(19) United States
(12) Patent Application Publication
(10) Pub. No.: US 2005/0053930 A1
(43) Pub. Date: Mar. 10, 2005

(54) Therapeutic polypeptides, nucleic acids encoding same, and methods of use

(76) Inventors: David Anderson, Plantsville, CT (US); Ferenc Boldog, North Haven, CT (US); Catherine Burgess, Wethersfield, CT (US); Stacie Casman, North Haven, CT (US); Shlomit Edinger, New Haven, CT (US); Andrew Eisen, Rockville, MD (US); Karen Ellerman, Branford, CT (US); Valerie Gerlach, Branford, CT (US); Linda Gorman, Branford, CT (US); Xiaojia (Sasha) Guo, Branford, CT (US); Vladimir Gusev, Madison, CT (US); Weizhen Ji, Branford, CT (US); Li Li, Branford, CT (US); John MacDougall, Hamden, CT (US); Uriel Malyankar, North Branford, CT (US); Isabelle Millet, Milford, CT (US); Tatiana Ort, Milford, CT (US); Muralidhara Padigaru, Branford, CT (US); Sudhirdas K. Prayaga, O'Fallon, MO (US); Meera Patturajan, Branford, CT (US); Carol Pena, New Haven, CT (US); John Peyman, New Haven, CT (US); Daniel Rieger, Branford, CT (US); Mark Rothenberg, Clinton, CT (US); Paul Sciore, North Haven, CT (US); Suresh Shenoy, Branford, CT (US); Glennda Smithson, Guilford, CT (US); Kimberly Spytek, Ellington, CT (US); David Stone, Guilford, CT (US); Raymond Taupier JR., East Haven, CT (US); Velizar Tchernev, Branford, CT (US); Corine A.M. Vernet, North Branford, CT (US); Edward Voss, Wallingford, CT (US); Bryan Zerhusen, Branford, CT (US); Mei Zhong, Branford, CT (US)

Correspondence Address: MINTZ, LEVIN, COHN, FERRIS, GLOVSKY;AND POPEO, P.C., ONE FINANCIAL CENTER, BOSTON, MA, 02111, US

(21) Appl. No.: 10/454,246

(22) Filed: Jun. 3, 2003

Related U.S. Application Data
(63) Continuation-in-part of application No. 09/898,994, filed on Jul. 3, 2001, now abandoned.
(60) Provisional application No. 60/218,903, filed on Jul. 18, 2000.
(60) Provisional application No. 60/387,002, filed on Jun. 7, 2002.
(60) Provisional application No. 60/385,504, filed on Jun. 4, 2002.
(60) Provisional application No. 60/386,974, filed on Jun. 6, 2002.
(60) Provisional application No. 60/386,453, filed on Jun. 6, 2002.
(60) Provisional application No. 60/386,041, filed on Jun. 5, 2002.
(60) Provisional application No. 60/386,816, filed on Jun. 7, 2002.
(60) Provisional application No. 60/387,540, filed on Jun. 10, 2002.
(60) Provisional application No. 60/403,486, filed on Aug. 13, 2002.
(60) Provisional application No. 60/387,659, filed on Jun. 11, 2002.
(60) Provisional application No. 60/403,522, filed on Aug. 14, 2002.
(60) Provisional application No. 60/396,706, filed on Jul. 17, 2002.
(60) Provisional application No. 60/389,742, filed on Jun. 17, 2002.
(60) Provisional application No. 60/387,037, filed on Jun. 7, 2002.
(60) Provisional application No. 60/402,832, filed on Aug. 12, 2002.
(60) Provisional application No. 60/389,123, filed on Jun. 13, 2002.
(60) Provisional application No. 60/403,748, filed on Aug. 15, 2002.
(60) Provisional application No. 60/389,729, filed on Jun. 17, 2002.
(60) Provisional application No. 60/390,006, filed on Jun. 19, 2002.
(60) Provisional application No. 60/387,934, filed on Jun. 12, 2002.

(51) Int. Cl. C12Q 1/68; C07K 14/47; A61K 38/17; C07H 21/04

(52) U.S. Cl. 435/6; 435/69.1; 435/320.1; 435/325; 530/350; 514/12; 536/23.5

(57) ABSTRACT

Disclosed herein are nucleic acid sequences that encode novel polypeptides. Also disclosed are polypeptides encoded by these nucleic acid sequences, and antibodies that immunospecifically bind to the polypeptide, as well as derivatives, variants, mutants, or fragments of the novel polypeptide, polynucleotide, or antibody specific to the polypeptide. The invention further discloses therapeutic, diagnostic and research methods for diagnosis, treatment, and prevention of disorders involving any one of these novel human nucleic acids and proteins.

### RELATED APPLICATIONS

[0001] This application is a continuation in part of U.S. Ser. No. 09/898,994, filed Jul. 3, 2001, which claims priority to U.S. Ser. No. 60/218,903, filed Jul. 18, 2000; U.S. Ser. No. 10/016,248, filed Dec. 10, 2001, which claims priority to U.S. Ser. No. 60/255,648, filed Dec. 14, 2000; U.S. Ser. No. 10/028,248, filed Dec. 19, 2001, which claims priority to U.S. Ser. No. 60/256,619, filed Dec. 19, 2000; U.S. Ser. No. 10/044,564, filed Jan. 11, 2002, which claims priority to U.S. Ser. No. 60/261,013, filed Jan. 11, 2001; U.S. Ser. No. 10/136,071, filed May 1, 2002, which claims priority to U.S. Ser. No. 60/289,087, filed May 7, 2001; and U.S. Ser. No. 09/908,193, filed Jul. 18, 2001; and this application claims priority to the following provisional applications: U.S. Ser. No. 60/387,002, filed Jun. 7, 2002; U.S. Ser. No. 60/385,504, filed Jun. 4, 2002; U.S. Ser. No. 60/386,974, filed Jun. 6, 2002; U.S. Ser. No. 60/386,453, filed Jun. 6, 2002; U.S. Ser. No. 60/386,041, filed Jun. 5, 2002; U.S. Ser. No. 60/386,816, filed Jun. 7, 2002; U.S. Ser. No. 60/387,540, filed Jun. 10, 2002; U.S. Ser. No. 60/403,486, filed Aug. 13, 2002; U.S. Ser. No. 60/365,491, filed Jun. 14, 2002; U.S. Ser. No. 60/387,659, filed Jun. 11, 2002; U.S. Ser. No. 60/403,522, filed Aug. 14, 2002; U.S. Ser. No. 60/387,934, filed Jun. 12, 2002; U.S. Ser. No. 60/390,006, filed Jun. 19, 2002; U.S. Ser. No. 60/389,729, filed Jun. 17, 2002; U.S. Ser. No. 60/403,748, filed Aug. 15, 2002; U.S. Ser. No. 60/389,123, filed Jun. 13, 2002; U.S. Ser. No. 60/402,832, filed Aug. 12, 2002; U.S. Ser. No. 60/387,037, filed Nov. 6, 2002; U.S. Ser. No. 60/389,742, filed Jun. 17, 2002; and U.S. Ser. No. 60/396,706, filed Jul. 17, 2002.

### FIELD OF THE INVENTION

[0002] The present invention relates to novel polypeptides, and the nucleic acids encoding them, having properties related to stimulation of biochemical or physiological responses in a cell, a tissue, an organ or an organism. More particularly, the novel polypeptides are gene products of novel genes, or are specified biologically active fragments or derivatives thereof. Methods of use encompass diagnostic and prognostic assay procedures as well as methods of treating diverse pathological conditions.

### BACKGROUND OF THE INVENTION

[0003] Eukaryotic cells are characterized by biochemical and physiological processes, which under normal conditions are exquisitely balanced to achieve the preservation and propagation of the cells. When such cells are components of multicellular organisms such as vertebrates or, more particularly, organisms such as mammals, the regulation of the biochemical and physiological processes involves intricate signaling pathways. Frequently, such signaling pathways involve extracellular signaling proteins, cellular receptors that bind the signaling proteins and signal transducing components located within the cells.

[0004] Signaling proteins may be classified as endocrine effectors, paracrine effectors or autocrine effectors. Endocrine effectors are signaling molecules secreted by a given organ into the circulatory system, which are then transported to a distant target organ or tissue. The target cells include the receptors for the endocrine effector, and when the endocrine effector binds, a signaling cascade is induced. Paracrine effectors involve secreting cells and receptor cells in close proximity to each other, for example, two different classes of cells in the same tissue or organ. One class of cells secretes the paracrine effector, which then reaches the second class of cells, for example by diffusion through the extracellular fluid. The second class of cells contains the receptors for the paracrine effector; binding of the effector results in induction of the signaling cascade that elicits the corresponding biochemical or physiological effect. Autocrine effectors are highly analogous to paracrine effectors, except that the same cell type that secretes the autocrine effector also contains the receptor. Thus the autocrine effector binds to receptors on the same cell, or on identical neighboring cells. The binding process then elicits the characteristic biochemical or physiological effect.

[0005] Signaling processes may elicit a variety of effects on cells and tissues including, by way of nonlimiting example, induction of cell or tissue proliferation, suppression of growth or proliferation, induction of differentiation or maturation of a cell or tissue, and suppression of differentiation or maturation of a cell or tissue.

[0006] Many pathological conditions involve dysregulation of expression of important effector proteins. In certain classes of pathologies the dysregulation is manifested as diminished or suppressed level of synthesis and secretion of protein effectors. In other classes of pathologies the dysregulation is manifested as increased or up-regulated level of synthesis and secretion of protein effectors. In a clinical setting a subject may be suspected of suffering from a condition brought on by altered or mis-regulated levels of a protein effector of interest. Therefore there is a need to assay for the level of the protein effector of interest in a biological sample from such a subject, and to compare the level with that characteristic of a nonpathological condition. There also is a need to provide the protein effector as a product of manufacture. Administration of the effector to a subject in need thereof is useful in treatment of the pathological condition. Accordingly, there is a need for a method of treatment of a pathological condition brought on by a diminished or suppressed levels of the protein effector of interest. In addition, there is a need for a method of treatment of a pathological condition brought on by a increased or up-regulated levels of the protein effector of interest.

[0007] Antibodies are multichain proteins that bind specifically to a given antigen, and bind poorly, or not at all, to substances deemed not to be cognate antigens. Antibodies are comprised of two short chains termed light chains and two long chains termed heavy chains. These chains are constituted of immunoglobulin domains, of which generally there are two classes: one variable domain per chain, one constant domain in light chains, and three or more constant domains in heavy chains. The antigen-specific portion of the immunoglobulin molecules resides in the variable domains; the variable domains of one light chain and one heavy chain associate with each other to generate the antigen-binding moiety. Antibodies that bind immunospecifically to a cognate or target antigen bind with high affinities. Accordingly, they are useful in assaying specifically for the presence of the antigen in a sample. In addition, they have the potential of inactivating the activity of the antigen.

[0008] Therefore there is a need to assay for the level of a protein effector of interest in a biological sample from such a subject, and to compare this level with that characteristic of a nonpathological condition. In particular, there is a need for such an assay based on the use of an antibody that binds immunospecifically to the antigen. There further is a need to inhibit the activity of the protein effector in cases where a pathological condition arises from elevated or excessive levels of the effector based on the use of an antibody that binds immunospecifically to the effector. Thus, there is a need for the antibody as a product of manufacture. There further is a need for a method of treatment of a pathological condition brought on by an elevated or excessive level of the protein effector of interest based on administering the antibody to the subject.

### SUMMARY OF THE INVENTION

[0009] The invention is based in part upon the discovery of isolated polypeptides including amino acid sequences selected from mature forms of the amino acid sequences selected from the group consisting of SEQ ID NO:2n, wherein n is an integer between 1 and 141. The novel nucleic acids and polypeptides are referred to herein as NOVX, or NOVI, NOV2, NOV3, etc., nucleic acids and polypeptides. These nucleic acids and polypeptides, as well as derivatives, homologs, analogs and fragments thereof, will hereinafter be collectively designated as “NOVX” nucleic acid or polypeptide sequences.

[0010] The invention also is based in part upon variants of a mature form of the amino acid sequence selected from the group consisting of SEQ ID NO:2n, wherein n is an integer between 1 and 141, wherein any amino acid in the mature form is changed to a different amino acid, provided that no more than 15% of the amino acid residues in the sequence of the mature form are so changed. In another embodiment, the invention includes the amino acid sequences selected from the group consisting of SEQ ID NO:2n, wherein n is an integer between 1 and 141. In another embodiment, the invention also comprises variants of the amino acid sequence selected from the group consisting of SEQ ID NO:2n, wherein n is an integer between 1 and 141, wherein any amino acid specified in the chosen sequence is changed to a different amino acid, provided that no more than 15% of the amino acid residues in the sequence are so changed. The invention also involves fragments of any of the mature forms of the amino acid sequences selected from the group consisting of SEQ ID NO:2n, wherein n is an integer between 1 and 141, or any other amino acid sequence selected from this group. The invention also comprises fragments from these groups in which up to 15% of the residues are changed.

[0011] In another embodiment, the invention encompasses polypeptides that are naturally occurring allelic variants of the sequence selected from the group consisting of SEQ ID NO:2n, wherein n is an integer between 1 and 141. These allelic variants include amino acid sequences that are the translations of nucleic acid sequences differing by a single nucleotide from nucleic acid sequences selected from the group consisting of SEQ ID NOS: 2n−1, wherein n is an integer between 1 and 141. The variant polypeptide where any amino acid changed in the chosen sequence is changed to provide a conservative substitution.

[0012] In another embodiment, the invention comprises a pharmaceutical composition involving a polypeptide with an amino acid sequence selected from the group consisting of SEQ ID NO:2n, wherein n is an integer between 1 and 141, and a pharmaceutically acceptable carrier. In another embodiment, the invention involves a kit, including, in one or more containers, this pharmaceutical composition.

[0013] In another embodiment, the invention includes the use of a therapeutic in the manufacture of a medicament for treating a syndrome associated with a human disease, the disease being selected from a pathology associated with a polypeptide with an amino acid sequence selected from the group consisting of SEQ ID NO:2n, wherein n is an integer between 1 and 141, wherein said therapeutic is the polypeptide selected from this group.

[0014] In another embodiment, the invention comprises a method for determining the presence or amount of a polypeptide with an amino acid sequence selected from the group consisting of SEQ ID NO:2n, wherein n is an integer between 1 and 141, in a sample, the method involving providing the sample; introducing the sample to an antibody that binds immunospecifically to the polypeptide; and determining the presence or amount of antibody bound to the polypeptide, thereby determining the presence or amount of polypeptide in the sample.

[0015] In another embodiment, the invention includes a method for determining the presence of or predisposition to a disease associated with altered levels of a polypeptide with an amino acid sequence selected from the group consisting of SEQ ID NO:2n, wherein n is an integer between 1 and 141, in a first mammalian subject, the method involving measuring the level of expression of the polypeptide in a sample from the first mammalian subject; and comparing the amount of the polypeptide in this sample to the amount of the polypeptide present in a control sample from a second mammalian subject known not to have, or not to be predisposed to, the disease, wherein an alteration in the expression level of the polypeptide in the first subject as compared to the control sample indicates the presence of or predisposition to the disease.

[0016] In another embodiment, the invention involves a method of identifying an agent that binds to a polypeptide with an amino acid sequence selected from the group consisting of SEQ ID NO:2n, wherein n is an integer between 1 and 141, the method including introducing the polypeptide to the agent; and determining whether the agent binds to the polypeptide. The agent could be a cellular receptor or a downstream effector.

[0017] In another embodiment, the invention involves a method for identifying a potential therapeutic agent for use in treatment of a pathology, wherein the pathology is related to aberrant expression or aberrant physiological interactions of a polypeptide with an amino acid sequence selected from the group consisting of SEQ ID NO:2n, wherein n is an integer between 1 and 141, the method including providing a cell expressing the polypeptide of the invention and having a property or function ascribable to the polypeptide; contacting the cell with a composition comprising a candidate substance; and determining whether the substance alters the property or function ascribable to the polypeptide; whereby, if an alteration observed in the presence of the substance is not observed when the cell is contacted with a composition devoid of the substance, the substance is identified as a potential therapeutic agent.

[0018] In another embodiment, the invention involves a method for screening for a modulator of activity or of latency or predisposition to a pathology associated with a polypeptide having an amino acid sequence selected from the group consisting of SEQ ID NO:2n, wherein n is an integer between 1 and 141, the method including administering a test compound to a test animal at increased risk for a pathology associated with the polypeptide of the invention, wherein the test animal recombinantly expresses the polypeptide of the invention; measuring the activity of the polypeptide in the test animal after administering the test compound; and comparing the activity of the protein in the test animal with the activity of the polypeptide in a control animal not administered the polypeptide, wherein a change in the activity of the polypeptide in the test animal relative to the control animal indicates the test compound is a modulator of latency of, or predisposition to, a pathology associated with the polypeptide of the invention. The recombinant test animal could express a test protein transgene or express the transgene under the control of a promoter at an increased level relative to a wild-type test animal The promoter may or may not b the native gene promoter of the transgene.

[0019] In another embodiment, the invention involves a method for modulating the activity of a polypeptide with an amino acid sequence selected from the group consisting of SEQ ID NO:2n, wherein n is an integer between 1 and 141, the method including introducing a cell sample expressing the polypeptide with a compound that binds to the polypeptide in an amount sufficient to modulate the activity of the polypeptide.

[0020] In another embodiment, the invention involves a method of treating or preventing a pathology associated with a polypeptide with an amino acid sequence selected from the group consisting of SEQ ID NO:2n, wherein n is an integer between 1 and 141, the method including administering the polypeptide to a subject in which such treatment or prevention is desired in an amount sufficient to treat or prevent the pathology in the subject. The subject could be human.

[0021] In another embodiment, the invention involves a method of treating a pathological state in a mammal, the method including administering to the mammal a polypeptide in an amount that is sufficient to alleviate the pathological state, wherein the polypeptide is a polypeptide having an amino acid sequence at least 95% identical to a polypeptide having the amino acid sequence selected from the group consisting of SEQ ID NO:2n, wherein n is an integer between 1 and 141, or a biologically active fragment thereof.

[0022] In another embodiment, the invention involves an isolated nucleic acid molecule comprising a nucleic acid sequence encoding a polypeptide having an amino acid sequence selected from the group consisting of a mature form of the amino acid sequence given SEQ ID NO:2n, wherein n is an integer between 1 and 141, a variant of a mature form of the amino acid sequence selected from the group consisting of SEQ ID NO:2n, wherein n is an integer between 1 and 141, wherein any amino acid in the mature form of the chosen sequence is changed to a different amino acid, provided that no more than 15% of the amino acid residues in the sequence of the mature form are so changed; the amino acid sequence selected from the group consisting of SEQ ID NO:2n, wherein n is an integer between 1 and 141, a variant of the amino acid sequence selected from the group consisting of SEQ ID NO:2n, wherein n is an integer between 1 and 141, in which any amino acid specified in the chosen sequence is changed to a different amino acid, provided that no more than 15% of the amino acid residues in the sequence are so changed; a nucleic acid fragment encoding at least a portion of a polypeptide comprising the amino acid sequence selected from the group consisting of SEQ ID NO:2n, wherein n is an integer between 1 and 141, or any variant of the polypeptide wherein any amino acid of the chosen sequence is changed to a different amino acid, provided that no more than 10% of the amino acid residues in the sequence are so changed; and the complement of any of the nucleic acid molecules.

[0023] In another embodiment, the invention comprises an isolated nucleic acid molecule having a nucleic acid sequence encoding a polypeptide comprising an amino acid sequence selected from the group consisting of a mature form of the amino acid sequence given SEQ ID NO:2n, wherein n is an integer between 1 and 141, wherein the nucleic acid molecule comprises the nucleotide sequence of a naturally occurring allelic nucleic acid variant.

[0024] In another embodiment, the invention involves an isolated nucleic acid molecule including a nucleic acid sequence encoding a polypeptide having an amino acid sequence selected from the group consisting of a mature form of the amino acid sequence given SEQ ID NO:2n, wherein n is an integer between 1 and 141, that encodes a variant polypeptide, wherein the variant polypeptide has the polypeptide sequence of a naturally occurring polypeptide variant.

[0025] In another embodiment, the invention comprises an isolated nucleic acid molecule having a nucleic acid sequence encoding a polypeptide comprising an amino acid sequence selected from the group consisting of a mature form of the amino acid sequence given SEQ ID NO:2n, wherein n is an integer between 1 and 141, wherein the nucleic acid molecule differs by a single nucleotide from a nucleic acid sequence selected from the group consisting of SEQ ID NOS: 2n−1, wherein n is an integer between 1 and 141.

[0026] In another embodiment, the invention includes an isolated nucleic acid molecule having a nucleic acid sequence encoding a polypeptide including an amino acid sequence selected from the group consisting of a mature form of the amino acid sequence given SEQ ID NO:2n, wherein n is an integer between 1 and 141, wherein the nucleic acid molecule comprises a nucleotide sequence selected from the group consisting of the nucleotide sequence selected from the group consisting of SEQ ID NO:2n−1, wherein n is an integer between 1 and 141, a nucleotide sequence wherein one or more nucleotides in the nucleotide sequence selected from the group consisting of SEQ ID NO:2n−1, wherein n is an integer between 1 and 141, is changed from that selected from the group consisting of the chosen sequence to a different nucleotide provided that no more than 15% of the nucleotides are so changed; a nucleic acid fragment of the sequence selected from the group consisting of SEQ ID NO:2n−1, wherein n is an integer between 1 and 141, and a nucleic acid fragment wherein one or more nucleotides in the nucleotide sequence selected from the group consisting of SEQ ID NO:2n−1, wherein n is an integer between 1 and 141, is changed from that selected from the group consisting of the chosen sequence to a different nucleotide provided that no more than 15% of the nucleotides are so changed.

[0027] In another embodiment, the invention includes an isolated nucleic acid molecule having a nucleic acid sequence encoding a polypeptide including an amino acid sequence selected from the group consisting of a mature form of the amino acid sequence given SEQ ID NO:2n, wherein n is an integer between 1 and 141, wherein the nucleic acid molecule hybridizes under stringent conditions to the nucleotide sequence selected from the group consisting of SEQ ID NO:2n−1, wherein n is an integer between 1 and 141, or a complement of the nucleotide sequence.

[0028] In another embodiment, the invention includes an isolated nucleic acid molecule having a nucleic acid sequence encoding a polypeptide including an amino acid sequence selected from the group consisting of a mature form of the amino acid sequence given SEQ ID NO:2n, wherein n is an integer between 1 and 141, wherein the nucleic acid molecule has a nucleotide sequence in which any nucleotide specified in the coding sequence of the chosen nucleotide sequence is changed from that selected from the group consisting of the chosen sequence to a different nucleotide provided that no more than 15% of the nucleotides in the chosen coding sequence are so changed, an isolated second polynucleotide that is a complement of the first polynucleotide, or a fragment of any of them.

[0029] In another embodiment, the invention includes a vector involving the nucleic acid molecule having a nucleic acid sequence encoding a polypeptide including an amino acid sequence selected from the group consisting of a mature form of the amino acid sequence given SEQ ID NO:2n, wherein n is an integer between 1 and 141. This vector can have a promoter operably linked to the nucleic acid molecule. This vector can be located within a cell.

[0030] In another embodiment, the invention involves a method for determining the presence or amount of a nucleic acid molecule having a nucleic acid sequence encoding a polypeptide including an amino acid sequence selected from the group consisting of a mature form of the amino acid sequence given SEQ ID NO:2n, wherein n is an integer between 1 and 141, in a sample, the method including providing the sample; introducing the sample to a probe that binds to the nucleic acid molecule; and determining the presence or amount of the probe bound to the nucleic acid molecule, thereby determining the presence or amount of the nucleic acid molecule in the sample. The presence or amount of the nucleic acid molecule is used as a marker for cell or tissue type. The cell type can be cancerous.

[0031] In another embodiment, the invention involves a method for determining the presence of or predisposition for a disease associated with altered levels of a nucleic acid molecule having a nucleic acid sequence encoding a polypeptide including an amino acid sequence selected from the group consisting of a mature form of the amino acid sequence given SEQ ID NO:2n, wherein n is an integer between 1 and 141, in a first mammalian subject, the method including measuring the amount of the nucleic acid in a sample from the first mammalian subject; and comparing the amount of the nucleic acid in the sample of step (a) to the amount of the nucleic acid present in a control sample from a second mammalian subject known not to have or not be predisposed to, the disease; wherein an alteration in the level of the nucleic acid in the first subject as compared to the control sample indicates the presence of or predisposition to the disease.

[0032] Unless otherwise defined, all technical and scientific terms used herein have the same meaning as commonly understood by one of ordinary skill in the art to which this invention belongs. Although methods and materials similar or equivalent to those described herein can be used in the practice or testing of the present invention, suitable methods and materials are described below. All publications, patent applications, patents, and other references mentioned herein are incorporated by reference in their entirety. In the case of conflict, the present specification, including definitions, will control. In addition, the materials, methods, and examples are illustrative only and are not intended to be limiting.

[0033] Other features and advantages of the invention will be apparent from the following detailed description and claims.

### DETAILED DESCRIPTION OF THE INVENTION

[0034] The present invention provides novel nucleotides and polypeptides encoded thereby. Included in the invention are the novel nucleic acid sequences, their encoded polypeptides, antibodies, and other related compounds. The sequences are collectively referred to herein as “NOVX nucleic acids” or “NOVX polynucleotides” and the corresponding encoded polypeptides are referred to as “NOVX polypeptides” or “NOVX proteins.” Unless indicated otherwise, “NOVX” is meant to refer to any of the novel sequences disclosed herein. Table A provides a summary of the NOVX nucleic acids and their encoded polypeptides.

TABLE A
Sequences and Corresponding SEQ ID Numbers

| | | SEQ ID | SEQ ID | |
|---|---|---|---|---|
| | | NO | NO | |
| NOVX | Internal | (nucleic | (amino | |
| Assignment | Identification | acid) | acid) | Homology |
| NOV1a | CG103945-02 | 1 | 2 | Semaphorin sem2 (FLJ00014 protein) - |
| | | | | Homo sapiens |
| NOV1b | CG103945-01 | 3 | 4 | Semaphorin sem2 (FLJ00014 protein) - |
| | | | | Homo sapiens |
| NOV2a | CG106951-01 | 5 | 6 | Human semaphorin G-like NHP protein |
| NOV2b | CG106951-04 | 7 | 8 | Human semaphorin G-like NHP protein |
| NOV2c | 209829549 | 9 | 10 | Human semaphorin G-like NHP protein |
| NOV2d | 209829553 | 11 | 12 | Human semaphorin G-like NHP protein |
| NOV2e | 209829642 | 13 | 14 | Human semaphorin G-like NHP protein |
| NOV2f | 209829670 | 15 | 16 | Human semaphorin G-like NHP protein |
| NOV2g | CG106951-02 | 17 | 18 | Human semaphorin G-like NHP protein |
| NOV2h | CG106951-03 | 19 | 20 | Human semaphorin G-like NHP protein |
| NOV2i | SNP13382456 | 21 | 22 | Human semaphorin G-like NHP protein |
| NOV3a | CG121295-01 | 23 | 24 | Endothelin-1 precursor (ET-1) - Homo |
| | | | | sapiens |
| NOV4a | CG124756-01 | 25 | 26 | complement subcomponent C1q chain |
| | | | | B precursor [validated] |
| NOV4b | CG124756-02 | 27 | 28 | complement subcomponent C1q chain |
| | | | | B precursor [validated] |
| NOV4c | SNP13382475 | 29 | 30 | complement subcomponent C1q chain |
| | | | | B precursor [validated] |
| NOV4d | SNP13382476 | 31 | 32 | complement subcomponent C1q chain |
| | | | | B precursor [validated] |
| NOV5a | CG50353-01 | 33 | 34 | Wnt-7a protein precursor - Homo |
| | | | | sapiens |
| NOV5b | 228753443 | 35 | 36 | Wnt-7a protein precursor - Homo |
| | | | | sapiens |
| NOV5c | 169475673 | 37 | 38 | Wnt-7a protein precursor - Homo |
| | | | | sapiens |
| NOV5d | 228753459 | 39 | 40 | Wnt-7a protein precursor - Homo |
| | | | | sapiens |
| NOV5e | 228753462 | 41 | 42 | Wnt-7a protein precursor - Homo |
| | | | | sapiens |
| NOV5f | 228753446 | 43 | 44 | Wnt-7a protein precursor - Homo |
| | | | | sapiens |
| NOV5g | 228753465 | 45 | 46 | Wnt-7a protein precursor - Homo |
| | | | | sapiens |
| NOV5h | 228753438 | 47 | 48 | Wnt-7a protein precursor - Homo |
| | | | | sapiens |
| NOV5i | 228753449 | 49 | 50 | Wnt-7a protein precursor - Homo |
| | | | | sapiens |
| NOV5j | CG50353-02 | 51 | 52 | Wnt-7a protein precursor - Homo |
| | | | | sapiens |
| NOV5k | CG50353-03 | 53 | 54 | Wnt-7a protein precursor - Homo |
| | | | | sapiens |
| NOV5l | SNP13382474 | 55 | 56 | Wnt-7a protein precursor - Homo |
| | | | | sapiens |
| NOV6a | CG50709-03 | 57 | 58 | Wnt-9b protein precursor (Wnt-15) |
| | | | | (Wnt-14b) - Homo sapiens |
| NOV6b | 282997951 | 59 | 60 | Wnt-9b protein precursor (Wnt-15) |
| | | | | (Wnt-14b) - Homo sapiens |
| NOV6c | CG50709-05 | 61 | 62 | Wnt-9b protein precursor (Wnt-15) |
| | | | | (Wnt-14b) - Homo sapiens |
| NOV6d | 277582109 | 63 | 64 | Wnt-9b protein precursor (Wnt-15) |
| | | | | (Wnt-14b) - Homo sapiens |
| NOV6e | 277582117 | 65 | 66 | Wnt-9b protein precursor (Wnt-15) |
| | | | | (Wnt-14b) - Homo sapiens |
| NOV6f | CG50709-01 | 67 | 68 | Wnt-9b protein precursor (Wnt-15) |
| | | | | (Wnt-14b) - Homo sapiens |
| NOV6g | CG50709-02 | 69 | 70 | Wnt-9b protein precursor (Wnt-15) |
| | | | | (Wnt-14b) - Homo sapiens |
| NOV6h | CG50709-04 | 71 | 72 | Wnt-9b protein precursor (Wnt-15) |
| | | | | (Wnt-14b) - Homo sapiens |
| NOV6i | CG50709-06 | 73 | 74 | Wnt-9b protein precursor (Wnt-15) |
| | | | | (Wnt-14b) - Homo sapiens |
| NOV6j | CG50709-07 | 75 | 76 | Wnt-9b protein precursor (Wnt-15) |
| | | | | (Wnt-14b) - Homo sapiens |
| NOV6k | SNP13381605 | 77 | 78 | Wnt-9b protein precursor (Wnt-15) |
| | | | | (Wnt-14b) - Homo sapiens |
| NOV6l | SNP13381606 | 79 | 80 | Wnt-9b protein precursor (Wnt-15) |
| | | | | (Wnt-14b) - Homo sapiens |
| NOV6m | SNP13378337 | 81 | 82 | Wnt-9b protein precursor (Wnt-15) |
| | | | | (Wnt-14b) - Homo sapiens |
| NOV6n | SNP13381607 | 83 | 84 | Wnt-9b protein precursor (Wnt-15) |
| | | | | (Wnt-14b) - Homo sapiens |
| NOV6o | SNP13378336 | 85 | 86 | Wnt-9b protein precursor (Wnt-15) |
| | | | | (Wnt-14b) - Homo sapiens |
| NOV6p | SNP13378335 | 87 | 88 | Wnt-9b protein precursor (Wnt-15) |
| | | | | (Wnt-14b) - Homo sapiens |
| NOV7a | CG53054-02 | 89 | 90 | Wnt-9a protein precursor (Wnt-14) - |
| | | | | Homo sapiens |
| NOV7b | 170251039 | 91 | 92 | Wnt-9a protein precursor (Wnt-14) - |
| | | | | Homo sapiens |
| NOV7c | 170251076 | 93 | 94 | Wnt-9a protein precursor (Wnt-14) - |
| | | | | Homo sapiens |
| NOV7d | CG53054-01 | 95 | 96 | Wnt-9a protein precursor (Wnt-14) - |
| | | | | Homo sapiens |
| NOV7e | CG53054-03 | 97 | 98 | Wnt-9a protein precursor (Wnt-14) - |
| | | | | Homo sapiens |
| NOV7f | CG53054-04 | 99 | 100 | Wnt-9a protein precursor (Wnt-14) - |
| | | | | Homo sapiens |
| NOV8a | CG53473-02 | 101 | 102 | Neuromedin B-32 precursor [Contains: |
| | | | | Neuromedin B] - Homo sapiens |
| NOV8b | CG53473-01 | 103 | 104 | Neuromedin B-32 precursor [Contains: |
| | | | | Neuromedin B] - Homo sapiens |
| NOV8c | CG53473-03 | 105 | 106 | Neuromedin B-32 precursor [Contains: |
| | | | | Neuromedin B] - Homo sapiens |
| NOV8d | SNP13376396 | 107 | 108 | Neuromedin B-32 precursor [Contains: |
| | | | | Neuromedin B] - Homo sapiens |
| NOV8e | SNP13376395 | 109 | 110 | Neuromedin B-32 precursor [Contains: |
| | | | | Neuromedin B] - Homo sapiens |
| NOV8f | SNP13376394 | 111 | 112 | Neuromedin B-32 precursor [Contains: |
| | | | | Neuromedin B] - Homo sapiens |
| NOV9a | CG55184-03 | 113 | 114 | Cerebellin-like glycoprotein 1 precursor - |
| | | | | Homo sapiens |
| NOV9b | CG55184-01 | 115 | 116 | Cerebellin-like glycoprotein 1 precursor - |
| | | | | Homo sapiens |
| NOV9c | CG55184-02 | 117 | 118 | Cerebellin-like glycoprotein 1 precursor - |
| | | | | Homo sapiens |
| NOV9d | CG55184-04 | 119 | 120 | Cerebellin-like glycoprotein 1 precursor - |
| | | | | Homo sapiens |
| NOV9e | CG55184-05 | 121 | 122 | Cerebellin-like glycoprotein 1 precursor - |
| | | | | Homo sapiens |
| NOV10a | CG55274-05 | 123 | 124 | Human endozepine-like ENDO5 |
| NOV10b | CG55274-01 | 125 | 126 | Human endozepine-like ENDO5 |
| NOV10c | CG55274-02 | 127 | 128 | Human endozepine-like ENDO5 |
| NOV10d | CG55274-03 | 129 | 130 | Human endozepine-like ENDO5 |
| NOV10e | CG55274-04 | 131 | 132 | Human endozepine-like ENDO5 |
| NOV11a | CG55379-04 | 133 | 134 | HDDM36 - Homo sapiens |
| NOV11b | CG55379-01 | 135 | 136 | HDDM36 - Homo sapiens |
| NOV11c | 258065951 | 137 | 138 | HDDM36 - Homo sapiens |
| NOV11d | 209886264 | 139 | 140 | HDDM36 - Homo sapiens |
| NOV11e | 209886345 | 141 | 142 | HDDM36 - Homo sapiens |
| NOV11f | 209886357 | 143 | 144 | HDDM36 - Homo sapiens |
| NOV11g | CG55379-02 | 145 | 146 | HDDM36 - Homo sapiens |
| NOV11h | CG55379-03 | 147 | 148 | HDDM36 - Homo sapiens |
| NOV12a | CG55688-01 | 149 | 150 | CYR61 protein precursor |
| | | | | (Cysteine-rich, angiogenic inducer, 61) |
| | | | | (Insulin-like growth factor-binding |
| | | | | protein 10) (GIG1 protein) - Homo |
| | | | | sapiens |
| NOV12b | 254087906 | 151 | 152 | CYR61 protein precursor |
| | | | | (Cysteine-rich, angiogenic inducer, 61) |
| | | | | (Insulin-like growth factor-binding |
| | | | | protein 10) (GIG1 protein) - Homo |
| | | | | sapiens |
| NOV12c | 259278648 | 153 | 154 | CYR61 protein precursor |
| | | | | (Cysteine-rich, angiogenic inducer, 61) |
| | | | | (Insulin-like growth factor-binding |
| | | | | protein 10) (GIG1 protein) - Homo |
| | | | | sapiens |
| NOV12d | 259280032 | 155 | 156 | CYR61 protein precursor |
| | | | | (Cysteine-rich, angiogenic inducer, 61) |
| | | | | (Insulin-like growth factor-binding |
| | | | | protein 10) (GIG1 protein) - Homo |
| | | | | sapiens |
| NOV12e | 254756530 | 157 | 158 | CYR61 protein precursor |
| | | | | (Cysteine-rich, angiogenic inducer, 61) |
| | | | | (Insulin-like growth factor-binding |
| | | | | protein 10) (GIG1 protein) - Homo |
| | | | | sapiens |
| NOV12f | 229509618 | 159 | 160 | CYR61 protein precursor |
| | | | | (Cysteine-rich, angiogenic inducer, 61) |
| | | | | (Insulin-like growth factor-binding |
| | | | | protein 10) (GIG1 protein) - Homo |
| | | | | sapiens |
| NOV12g | 229509658 | 161 | 162 | CYR61 protein precursor |
| | | | | (Cysteine-rich, angiogenic inducer, 61) |
| | | | | (Insulin-like growth factor-binding |
| | | | | protein 10) (GIG1 protein) - Homo |
| | | | | sapiens |
| NOV12h | CG55688-02 | 163 | 164 | CYR61 protein precursor |
| | | | | (Cysteine-rich, angiogenic inducer, 61) |
| | | | | (Insulin-like growth factor-binding |
| | | | | protein 10) (GIG1 protein) - Homo |
| | | | | sapiens |
| NOV12i | CG55688-03 | 165 | 166 | CYR61 protein precursor |
| | | | | (Cysteine-rich, angiogenic inducer, 61) |
| | | | | (Insulin-like growth factor-binding |
| | | | | protein 10) (GIG1 protein) - Homo |
| | | | | sapiens |
| NOV12j | CG55688-04 | 167 | 168 | CYR61 protein precursor |
| | | | | (Cysteine-rich, angiogenic inducer, 61) |
| | | | | (Insulin-like growth factor-binding |
| | | | | protein 10) (GIG1 protein) - Homo |
| | | | | sapiens |
| NOV12k | CG55688-05 | 169 | 170 | CYR61 protein precursor |
| | | | | (Cysteine-rich, angiogenic inducer, 61) |
| | | | | (Insulin-like growth factor-binding |
| | | | | protein 10) (GIG1 protein) - Homo |
| | | | | sapiens |
| NOV12l | CG55688-06 | 171 | 172 | CYR61 protein precursor |
| | | | | (Cysteine-rich, angiogenic inducer, 61) |
| | | | | (Insulin-like growth factor-binding |
| | | | | protein 10) (GIG1 protein) - Homo |
| | | | | sapiens |
| NOV12m | SNP13376428 | 173 | 174 | CYR61 protein precursor |
| | | | | (Cysteine-rich, angiogenic inducer, 61) |
| | | | | (Insulin-like growth factor-binding |
| | | | | protein 10) (GIG1 protein) - Homo |
| | | | | sapiens |
| NOV13a | CG56768-01 | 175 | 176 | Wnt-5a protein precursor - Homo |
| | | | | sapiens |
| NOV13b | CG56768-02 | 177 | 178 | Wnt-5a protein precursor - Homo |
| | | | | sapiens |
| NOV13c | CG56768-03 | 179 | 180 | Wnt-5a protein precursor - Homo |
| | | | | sapiens |
| NOV14a | CG57054-03 | 181 | 182 | Wnt-10b protein precursor (Wnt-12) - |
| | | | | Homo sapiens |
| NOV14b | CG57054-01 | 183 | 184 | Wnt-10b protein precursor (Wnt-12) - |
| | | | | Homo sapiens |
| NOV14c | CG57054-02 | 185 | 186 | Wnt-10b protein precursor (Wnt-12) - |
| | | | | Homo sapiens |
| NOV15a | CG57431-03 | 187 | 188 | Endothelin-2 precursor (ET-2) - Homo |
| | | | | sapiens |
| NOV15b | CG57431-02 | 189 | 190 | Endothelin-2 precursor (ET-2) - Homo |
| | | | | sapiens |
| NOV15c | CG57431-01 | 191 | 192 | Endothelin-2 precursor (ET-2) - Homo |
| | | | | sapiens |
| NOV15d | CG57431-04 | 193 | 194 | Endothelin-2 precursor (ET-2) - Homo |
| | | | | sapiens |
| NOV16a | CG59253-01 | 195 | 196 | Semaphorin 6D isoform 2 - Homo |
| | | | | sapiens |
| NOV16b | 194877881 | 197 | 198 | Semaphorin 6D isoform 2 - Homo |
| | | | | sapiens |
| NOV16c | CG59253-02 | 199 | 200 | Semaphorin 6D isoform 2 - Homo |
| | | | | sapiens |
| NOV16d | 191815765 | 201 | 202 | Semaphorin 6D isoform 2 - Homo |
| | | | | sapiens |
| NOV16e | CG59253-03 | 203 | 204 | Semaphorin 6D isoform 2 - Homo |
| | | | | sapiens |
| NOV16f | CG59253-04 | 205 | 206 | Semaphorin 6D isoform 2 - Homo |
| | | | | sapiens |
| NOV16g | CG59253-05 | 207 | 208 | Semaphorin 6D isoform 2 - Homo |
| | | | | sapiens |
| NOV16h | CG59253-06 | 209 | 210 | Semaphorin 6D isoform 2 - Homo |
| | | | | sapiens |
| NOV16i | CG59253-07 | 211 | 212 | Semaphorin 6D isoform 2 - Homo |
| | | | | sapiens |
| NOV16j | CG59253-08 | 213 | 214 | Semaphorin 6D isoform 2 - Homo |
| | | | | sapiens |
| NOV16k | CG59253-09 | 215 | 216 | Semaphorin 6D isoform 2 - Homo |
| | | | | sapiens |
| NOV16l | CG59253-10 | 217 | 218 | Semaphorin 6D isoform 2 - Homo |
| | | | | sapiens |
| NOV16m | SNP13381547 | 219 | 220 | Semaphorin 6D isoform 2 - Homo |
| | | | | sapiens |
| NOV16n | SNP13378936 | 221 | 222 | Semaphorin 6D isoform 2 - Homo |
| | | | | sapiens |
| NOV16o | SNP13378935 | 223 | 224 | Semaphorin 6D isoform 2 - Homo |
| | | | | sapiens |
| NOV16p | SNP13381569 | 225 | 226 | Semaphorin 6D isoform 2 - Homo |
| | | | | sapiens |
| NOV16q | SNP13382528 | 227 | 228 | Semaphorin 6D isoform 2 - Homo |
| | | | | sapiens |
| NOV17a | CG95430-02 | 229 | 230 | Energen-related secreted protein - C2P |
| NOV17b | CG95430-04 | 231 | 232 | Energen-related secreted protein - C2P |
| NOV17c | CG95430-01 | 233 | 234 | Energen-related secreted protein - C2P |
| NOV17d | 319194717 | 235 | 236 | Energen-related secreted protein - C2P |
| NOV17e | CG95430-03 | 237 | 238 | Energen-related secreted protein - C2P |
| NOV17f | CG95430-05 | 239 | 240 | Energen-related secreted protein - C2P |
| NOV17g | CG95430-06 | 241 | 242 | Energen-related secreted protein - C2P |
| NOV17h | CG95430-07 | 243 | 244 | Energen-related secreted protein - C2P |
| NOV17i | CG95430-08 | 245 | 246 | Energen-related secreted protein - C2P |
| NOV17j | CG95430-09 | 247 | 248 | Energen-related secreted protein - C2P |
| NOV17k | CG95430-10 | 249 | 250 | Energen-related secreted protein - C2P |
| NOV17l | CG95430-11 | 251 | 252 | Energen-related secreted protein - C2P |
| NOV17m | CG95430-12 | 253 | 254 | Energen-related secreted protein - C2P |
| NOV17n | CG95430-13 | 255 | 256 | Energen-related secreted protein - C2P |
| NOV17o | SNP13379412 | 257 | 258 | Energen-related secreted protein - C2P |
| NOV17p | SNP13381828 | 259 | 260 | Energen-related secreted protein - C2P |
| NOV17q | SNP13379125 | 261 | 262 | Energen-related secreted protein - C2P |
| NOV17r | SNP13381827 | 263 | 264 | Energen-related secreted protein - C2P |
| NOV17s | SNP13381822 | 265 | 266 | Energen-related secreted protein - C2P |
| NOV17t | SNP13381826 | 267 | 268 | Energen-related secreted protein - C2P |
| NOV18a | CG97111-01 | 269 | 270 | Human IL-1 receptor antagonist protein |
| NOV18b | CG97111-02 | 271 | 272 | Human IL-1 receptor antagonist protein |
| NOV18c | CG97111-03 | 273 | 274 | Human IL-1 receptor antagonist protein |
| NOV18d | SNP13382516 | 275 | 276 | Human IL-1 receptor antagonist protein |
| NOV18e | SNP13382517 | 277 | 278 | Human IL-1 receptor antagonist protein |
| NOV18f | SNP13382518 | 279 | 280 | Human IL-1 receptor antagonist protein |
| NOV19a | 10132038.0.67 | 281 | 282 | Domain of CG50513-05 |

[0035] Table A indicates the homology of NOVX polypeptides to known protein families. Thus, the nucleic acids and polypeptides, antibodies and related compounds according to the invention corresponding to a NOVX as identified in column 1 of Table A will be useful in therapeutic and diagnostic applications implicated in, for example, pathologies and disorders associated with the known protein families identified in column 5 of Table A.

[0036] Pathologies, diseases, disorders, conditions and the like that are associated with NOVX sequences include, but are not limited to, e.g., cardiomyopathy, atherosclerosis, hypertension, congenital heart defects, aortic stenosis, atrial septal defect (ASD), atrioventricular (A-V) canal defect, ductus arteriosus, pulmonary stenosis, subaortic stenosis, ventricular septal defect (VSD), valve diseases, tuberous sclerosis, scleroderma, obesity, metabolic disturbances associated with obesity, transplantation, adrenoleukodystrophy, congenital adrenal hyperplasia, prostate cancer, diabetes, metabolic disorders, neoplasm; adenocarcinoma, lymphoma, uterus cancer, fertility, hemophilia, hypercoagulation, idiopathic thrombocytopenic purpura, immunodeficiencies, graft versus host disease, AIDS, bronchial asthma, Crohn's disease; multiple sclerosis, treatment of Albright Hereditary Ostoeodystrophy, infectious disease, anorexia, cancer-associated cachexia, cancer, neurodegenerative disorders, Alzheimer's Disease, Parkinson's Disorder, immune disorders, hematopoietic disorders, and the various dyslipidemias, the metabolic syndrome X and wasting disorders associated with chronic diseases and various cancers, as well as conditions such as transplantation and fertility.

[0037] NOVX nucleic acids and their encoded polypeptides are useful in a variety of applications and contexts. The various NOVX nucleic acids and polypeptides according to the invention are useful as novel members of the protein families according to the presence of domains and sequence relatedness to previously described proteins. Additionally, NOVX nucleic acids and polypeptides can also be used to identify proteins that are members of the family to which the NOVX polypeptides belong.

[0038] Consistent with other known members of the family of proteins, identified in column 5 of Table A, the NOVX polypeptides of the present invention show homology to, and contain domains that are characteristic of, other members of such protein families. Details of the sequence relatedness and domain analysis for each NOVX are presented in Example A.

[0039] The NOVX nucleic acids and polypeptides can also be used to screen for molecules, which inhibit or enhance NOVX activity or function. Specifically, the nucleic acids and polypeptides according to the invention may be used as targets for the identification of small molecules that modulate or inhibit diseases associated with the protein families listed in Table A.

[0040] The NOVX nucleic acids and polypeptides are also useful for detecting specific cell types. Details of the expression analysis for each NOVX are presented in Example C. Accordingly, the NOVX nucleic acids, polypeptides, antibodies and related compounds according to the invention will have diagnostic and therapeutic applications in the detection of a variety of diseases with differential expression in normal vs. diseased tissues, e.g., detection of a variety of cancers.

[0041] Additional utilities for NOVX nucleic acids and polypeptides according to the invention are disclosed herein.

[0042] NOVX Clones

[0043] NOVX nucleic acids and their encoded polypeptides are useful in a variety of applications and contexts. The various NOVX nucleic acids and polypeptides according to the invention are useful as novel members of the protein families according to the presence of domains and sequence relatedness to previously described proteins. Additionally, NOVX nucleic acids and polypeptides can also be used to identify proteins that are members of the family to which the NOVX polypeptides belong.

[0044] The NOVX genes and their corresponding encoded proteins are useful for preventing, treating or ameliorating medical conditions, e.g., by protein or gene therapy. Pathological conditions can be diagnosed by determining the amount of the new protein in a sample or by determining the presence of mutations in the new genes. Specific uses are described for each of the NOVX genes, based on the tissues in which they are most highly expressed. Uses include developing products for the diagnosis or treatment of a variety of diseases and disorders.

[0045] The NOVX nucleic acids and proteins of the invention are useful in potential diagnostic and therapeutic applications and as a research tool. These include serving as a specific or selective nucleic acid or protein diagnostic and/or prognostic marker, wherein the presence or amount of the nucleic acid or the protein are to be assessed, as well as potential therapeutic applications such as the following: (i) a protein therapeutic, (ii) a small molecule drug target, (iii) an antibody target (therapeutic, diagnostic, drug targeting/cytotoxic antibody), (iv) a nucleic acid useful in gene therapy (gene delivery/gene ablation), and (v) a composition promoting tissue regeneration in vitro and in vivo (vi) a biological defense weapon.

[0046] In one specific embodiment, the invention includes an isolated polypeptide comprising an amino acid sequence selected from the group consisting of: (a) a mature form of the amino acid sequence selected from the group consisting of SEQ ID NO:2n, wherein n is an integer between 1 and 141, (b) a variant of a mature form of the amino acid sequence selected from the group consisting of SEQ ID NO:2n, wherein n is an integer between 1 and 141, wherein any amino acid in the mature form is changed to a different amino acid, provided that no more than 15% of the amino acid residues in the sequence of the mature form are so changed; (c) an amino acid sequence selected from the group consisting of SEQ ID NO:2n, wherein n is an integer between 1 and 141, (d) a variant of the amino acid sequence selected from the group consisting of SEQ ID NO:2n, wherein n is an integer between 1 and 141, wherein any amino acid specified in the chosen sequence is changed to a different amino acid, provided that no more than 15% of the amino acid residues in the sequence are so changed; and (e) a fragment of any of (a) through (d).

[0047] In another specific embodiment, the invention includes an isolated nucleic acid molecule comprising a nucleic acid sequence encoding a polypeptide comprising an amino acid sequence selected from the group consisting of: (a) a mature form of the amino acid sequence given SEQ ID NO:2n, wherein n is an integer between 1 and 141; (b) a variant of a mature form of the amino acid sequence selected from the group consisting of SEQ ID NO:2n, wherein n is an integer between 1 and 141, wherein any amino acid in the mature form of the chosen sequence is changed to a different amino acid, provided that no more than 15% of the amino acid residues in the sequence of the mature form are so changed; (c) the amino acid sequence selected from the group consisting of SEQ ID NO:2n, wherein n is an integer between 1 and 141; (d) a variant of the amino acid sequence selected from the group consisting of SEQ ID NO:2n, wherein n is an integer between 1 and 141, in which any amino acid specified in the chosen sequence is changed to a different amino acid, provided that no more than 15% of the amino acid residues in the sequence are so changed; (e) a nucleic acid fragment encoding at least a portion of a polypeptide comprising the amino acid sequence selected from the group consisting of SEQ ID NO:2n, wherein n is an integer between 1 and 141, or any variant of said polypeptide wherein any amino acid of the chosen sequence is changed to a different amino acid, provided that no more than 10% of the amino acid residues in the sequence are so changed; and (f) the complement of any of said nucleic acid molecules.

[0048] In yet another specific embodiment, the invention includes an isolated nucleic acid molecule, wherein said nucleic acid molecule comprises a nucleotide sequence selected from the group consisting of: (a) the nucleotide sequence selected from the group consisting of SEQ ID NO:2n−1, wherein n is an integer between 1 and 141; (b) a nucleotide sequence wherein one or more nucleotides in the nucleotide sequence selected from the group consisting of SEQ ID NO:2n−1, wherein n is an integer between 1 and 141, is changed from that selected from the group consisting of the chosen sequence to a different nucleotide provided that no more than 15% of the nucleotides are so changed; (c) a nucleic acid fragment of the sequence selected from the group consisting of SEQ ID NO:2n−1, wherein n is an integer between 1 and 141; and (d) a nucleic acid fragment wherein one or more nucleotides in the nucleotide sequence selected from the group consisting of SEQ ID NO:2n−1, wherein n is an integer between 1 and 141, is changed from that selected from the group consisting of the chosen sequence to a different nucleotide provided that no more than 15% of the nucleotides are so changed.

[0049] NOVX Nucleic Acids and Polypeptides

[0050] One aspect of the invention pertains to isolated nucleic acid molecules that encode NOVX polypeptides or biologically active portions thereof. Also included in the invention are nucleic acid fragments sufficient for use as hybridization probes to identify NOVX-encoding nucleic acids (e.g., NOVX mRNAs) and fragments for use as PCR primers for the amplification and/or mutation of NOVX nucleic acid molecules. As used herein, the term “nucleic acid molecule” is intended to include DNA molecules (e.g., cDNA or genomic DNA), RNA molecules (e.g., mRNA), analogs of the DNA or RNA generated using nucleotide analogs, and derivatives, fragments and homologs thereof. The nucleic acid molecule may be single-stranded or double-stranded, but preferably is comprised double-stranded DNA.

[0051] A NOVX nucleic acid can encode a mature NOVX polypeptide. As used herein, a “mature” form of a polypeptide or protein disclosed in the present invention is the product of a naturally occurring polypeptide, precursor form, or proprotein. The naturally occurring polypeptide, precursor or proprotein includes, by way of nonlimiting example, the full-length gene product encoded by the corresponding gene. Alternatively, it may be defined as the polypeptide, precursor or proprotein encoded by an ORF described herein. The product “mature” form arises, by way of nonlimiting example, as a result of one or more naturally occurring processing steps that may take place within the cell (e.g., host cell) in which the gene product arises. Examples of such processing steps leading to a “mature” form of a polypeptide or protein include the cleavage of the N-terminal methionine residue encoded by the initiation codon of an ORF or the proteolytic cleavage of a signal peptide or leader sequence. Thus a mature form arising from a precursor polypeptide or protein that has residues 1 to N, where residue 1 is the N-terminal methionine, would have residues 2 through N remaining after removal of the N-terminal methionine. Alternatively, a mature form arising from a precursor polypeptide or protein having residues 1 to N, in which an N-terminal signal sequence from residue 1 to residue M is cleaved, would have the residues from residue M+1 to residue N remaining. Further as used herein, a “mature” form of a polypeptide or protein may arise from a post-translational modification step other than a proteolytic cleavage event. Such additional processes include, by way of non-limiting example, glycosylation, myristylation or phosphorylation. In general, a mature polypeptide or protein may result from the operation of only one of these processes, or a combination of any of them.

[0052] The term “probe”, as utilized herein, refers to nucleic acid sequences of variable length, preferably between at least about 10 nucleotides (nt), about 100 nt, or as many as approximately, e.g., 6,000 nt, depending upon the specific use. Probes are used in the detection of identical, similar, or complementary nucleic acid sequences. Longer length probes are generally obtained from a natural or recombinant source, are highly specific, and much slower to hybridize than shorter-length oligomer probes. Probes may be single- or double-stranded and designed to have specificity in PCR, membrane-based hybridization technologies, or ELISA-like technologies.

[0053] The term “isolated” nucleic acid molecule, as used herein, is a nucleic acid that is separated from other nucleic acid molecules which are present in the natural source of the nucleic acid. Preferably, an “isolated” nucleic acid is free of sequences which naturally flank the nucleic acid (i.e., sequences located at the 5′- and 3′-termini of the nucleic acid) in the genomic DNA of the organism from which the nucleic acid is derived. For example, in various embodiments, the isolated NOVX nucleic acid molecules can contain less than about 5 kb, about 4 kb, about 3 kb, about 2 kb, about 1 kb, about 0.5 kb, or about 0.1 kb, of nucleotide sequences which naturally flank the nucleic acid molecule in genomic DNA of the cell/tissue from which the nucleic acid is derived (e.g., brain, heart, liver, spleen, etc.). Moreover, an “isolated” nucleic acid molecule, such as a cDNA molecule, can be substantially free of other cellular material, or culture medium, or of chemical precursors or other chemicals.

[0054] A nucleic acid molecule of the invention, e.g., a nucleic acid molecule having the nucleotide sequence of SEQ ID NOS: 2n−1, wherein n is an integer between 1 and 141, or a complement of this nucleotide sequence, can be isolated using standard molecular biology techniques and the sequence information provided herein. Using all or a portion of the nucleic acid sequence of SEQ ID NOS:2n−1, wherein n is an integer between 1 and 141, as a hybridization probe, NOVX molecules can be isolated using standard hybridization and cloning techniques (e.g., as described in Sambrook, et al., (eds.), MOLECULAR CLONING: A LABORATORY MANUAL 2^{nd} Ed., Cold Spring Harbor Laboratory Press, Cold Spring Harbor, N.Y., 1989; and Ausubel, et al., (eds.), CURRENT PROTOCOLS IN MOLECULAR BIOLOGY, John Wiley & Sons, New York, N.Y., 1993).

[0055] A nucleic acid of the invention can be amplified using cDNA, mRNA or, alternatively, genomic DNA as a template with appropriate oligonucleotide primers according to standard PCR amplification techniques. The nucleic acid so amplified can be cloned into an appropriate vector and characterized by DNA sequence analysis. Furthermore, oligonucleotides corresponding to NOVX nucleotide sequences can be prepared by standard synthetic techniques, e.g., using an automated DNA synthesizer.

[0056] As used herein, the term “oligonucleotide” refers to a series of linked nucleotide residues. A short oligonucleotide sequence may be based on, or designed from, a genomic or cDNA sequence and is used to amplify, confirm, or reveal the presence of an identical, similar or complementary DNA or RNA in a particular cell or tissue. Oligonucleotides comprise a nucleic acid sequence having about 10 nt, 50 nt, or 100 nt in length, preferably about 15 nt to 30 nt in length. In one embodiment of the invention, an oligonucleotide comprising a nucleic acid molecule less than 100 nt in length would further comprise at least 6 contiguous nucleotides of SEQ ID NOS:2n−1, wherein n is an integer between 1 and 141, or a complement thereof. Oligonucleotides may be chemically synthesized and may also be used as probes.

[0057] In another embodiment, an isolated nucleic acid molecule of the invention comprises a nucleic acid molecule that is a complement of the nucleotide sequence shown in SEQ ID NOS:2n−1, wherein n is an integer between 1 and 141, or a portion of this nucleotide sequence (e.g., a fragment that can be used as a probe or primer or a fragment encoding a biologically-active portion of a NOVX polypeptide). A nucleic acid molecule that is complementary to the nucleotide sequence of SEQ ID NOS:2n−1, wherein n is an integer between 1 and 141, is one that is sufficiently complementary to the nucleotide sequence of SEQ ID NOS:2n−1, wherein n is an integer between 1 and 141, that it can hydrogen bond with few or no mismatches to a nucleotide sequence of SEQ ID NOS:2n−1, wherein n is an integer between 1 and 141, thereby forming a stable duplex.

[0058] As used herein, the term “complementary” refers to Watson-Crick or Hoogsteen base pairing between nucleotides units of a nucleic acid molecule, and the term “binding” means the physical or chemical interaction between two polypeptides or compounds or associated polypeptides or compounds or combinations thereof. Binding includes ionic, non-ionic, van der Waals, hydrophobic interactions, and the like. A physical interaction can be either direct or indirect. Indirect interactions may be through or due to the effects of another polypeptide or compound. Direct binding refers to interactions that do not take place through, or due to, the effect of another polypeptide or compound, but instead are without other substantial chemical intermediates.

[0059] A “fragment” provided herein is defined as a sequence of at least 6 (contiguous) nucleic acids or at least 4 (contiguous) amino acids, a length sufficient to allow for specific hybridization in the case of nucleic acids or for specific recognition of an epitope in the case of amino acids, and is at most some portion less than a full length sequence. Fragments may be derived from any contiguous portion of a nucleic acid or amino acid sequence of choice.

[0060] A full-length NOVX clone is identified as containing an ATG translation start codon and an in-frame stop codon. Any disclosed NOVX nucleotide sequence lacking an ATG start codon therefore encodes a truncated C-terminal fragment of the respective NOVX polypeptide, and requires that the corresponding full-length cDNA extend in the 5′ direction of the disclosed sequence. Any disclosed NOVX nucleotide sequence lacking an in-frame stop codon similarly encodes a truncated N-terminal fragment of the respective NOVX polypeptide, and requires that the corresponding full-length cDNA extend in the 3′ direction of the disclosed sequence.

[0061] A “derivative” is a nucleic acid sequence or amino acid sequence formed from the native compounds either directly, by modification or partial substitution. An “analog” is a nucleic acid sequence or amino acid sequence that has a structure similar to, but not identical to, the native compound, e.g. they differs from it in respect to certain components or side chains. Analogs may be synthetic or derived from a different evolutionary origin and may have a similar or opposite metabolic activity compared to wild type. A “homolog” is a nucleic acid sequence or amino acid sequence of a particular gene that is derived from different species.

[0062] Derivatives and analogs may be full length or other than full length. Derivatives or analogs of the nucleic acids or proteins of the invention include, but are not limited to, molecules comprising regions that are substantially homologous to the nucleic acids or proteins of the invention, in various embodiments, by at least about 70%, 80%, or 95% identity (with a preferred identity of 80-95%) over a nucleic acid or amino acid sequence of identical size or when compared to an aligned sequence in which the alignment is done by a computer homology program known in the art, or whose encoding nucleic acid is capable of hybridizing to the complement of a sequence encoding the proteins under stringent, moderately stringent, or low stringent conditions. See e.g. Ausubel, et al., CURRENT PROTOCOLS IN MOLECULAR BIOLOGY, John Wiley & Sons, New York, N.Y., 1993, and below.

[0063] A “homologous nucleic acid sequence” or “homologous amino acid sequence,” or variations thereof, refer to sequences characterized by a homology at the nucleotide level or amino acid level as discussed above. Homologous nucleotide sequences include those sequences coding for isoforms of NOVX polypeptides. Isoforms can be expressed in different tissues of the same organism as a result of, for example, alternative splicing of RNA. Alternatively, isoforms can be encoded by different genes. In the invention, homologous nucleotide sequences include nucleotide sequences encoding for a NOVX polypeptide of species other than humans, including, but not limited to: vertebrates, and thus can include, e.g., frog, mouse, rat, rabbit, dog, cat cow, horse, and other organisms. Homologous nucleotide sequences also include, but are not limited to, naturally occurring allelic variations and mutations of the nucleotide sequences set forth herein. A homologous nucleotide sequence does not, however, include the exact nucleotide sequence encoding human NOVX protein. Homologous nucleic acid sequences include those nucleic acid sequences that encode conservative amino acid substitutions (see below) in SEQ ID NO:2n−1, wherein n is an integer between 1 and 141, as well as a polypeptide possessing NOVX biological activity. Various biological activities of the NOVX proteins are described below.

[0064] A NOVX polypeptide is encoded by the open reading frame (“ORF”) of a NOVX nucleic acid. An ORF corresponds to a nucleotide sequence that could potentially be translated into a polypeptide. A stretch of nucleic acids comprising an ORF is uninterrupted by a stop codon. An ORF that represents the coding sequence for a full protein begins with an ATG “start” codon and terminates with one of the three “stop” codons, namely, TAA, TAG, or TGA. For the purposes of this invention, an ORF may be any part of a coding sequence, with or without a start codon, a stop codon, or both. For an ORF to be considered as a good candidate for coding for a bonafide cellular protein, a minimum size requirement is often set, e.g., a stretch of DNA that would encode a protein of 50 amino acids or more.

[0065] The nucleotide sequences determined from the cloning of the human NOVX genes allows for the generation of probes and primers designed for use in identifying and/or cloning NOVX homologues in other cell types, e.g. from other tissues, as well as NOVX homologues from other vertebrates. The probe/primer typically comprises substantially purified oligonucleotide. The oligonucleotide typically comprises a region of nucleotide sequence that hybridizes under stringent conditions to at least about 12, 25, 50, 100, 150, 200, 250, 300, 350 or 400 consecutive sense strand nucleotide sequence of SEQ ID NO:2n−1, wherein n is an integer between 1 and 141; or an anti-sense strand nucleotide sequence of SEQ ID NO:2n−1, wherein n is an integer between 1 and 141; or of a naturally occurring mutant of SEQ ID NO:2n−1, wherein n is an integer between 1 and 141.

[0066] Probes based on the human NOVX nucleotide sequences can be used to detect transcripts or genomic sequences encoding the same or homologous proteins. In various embodiments, the probe has a detectable label attached, e.g. the label can be a radioisotope, a fluorescent compound, an enzyme, or an enzyme co-factor. Such probes can be used as a part of a diagnostic test kit for identifying cells or tissues which mis-express a NOVX protein, such as by measuring a level of a NOVX-encoding nucleic acid in a sample of cells from a subject e.g., detecting NOVX mRNA levels or determining whether a genomic NOVX gene has been mutated or deleted.

[0067] “A polypeptide having a biologically-active portion of a NOVX polypeptide” refers to polypeptides exhibiting activity similar, but not necessarily identical to, an activity of a polypeptide of the invention, including mature forms, as measured in a particular biological assay, with or without dose dependency. A nucleic acid fragment encoding a “biologically-active portion of NOVX” can be prepared by isolating a portion of SEQ ID NO:2n−1, wherein n is an integer between 1 and 141, that encodes a polypeptide having a NOVX biological activity (the biological activities of the NOVX proteins are described below), expressing the encoded portion of NOVX protein (e.g., by recombinant expression in vitro) and assessing the activity of the encoded portion of NOVX.

[0068] NOVX Nucleic Acid and Polypeptide Variants

[0069] The invention further encompasses nucleic acid molecules that differ from the nucleotide sequences of SEQ ID NO:2n−1, wherein n is an integer between 1 and 141, due to degeneracy of the genetic code and thus encode the same NOVX proteins as that encoded by the nucleotide sequences of SEQ ID NO:2n−1, wherein n is an integer between 1 and 141. In another embodiment, an isolated nucleic acid molecule of the invention has a nucleotide sequence encoding a protein having an amino acid sequence of SEQ ID NO:2n, wherein n is an integer between 1 and 141.

[0070] In addition to the human NOVX nucleotide sequences of SEQ ID NO:2n−1, wherein n is an integer between 1 and 141, it will be appreciated by those skilled in the art that DNA sequence polymorphisms that lead to changes in the amino acid sequences of the NOVX polypeptides may exist within a population (e.g., the human population). Such genetic polymorphism in the NOVX genes may exist among individuals within a population due to natural allelic variation. As used herein, the terms “gene” and “recombinant gene” refer to nucleic acid molecules comprising an open reading frame (ORF) encoding a NOVX protein, preferably a vertebrate NOVX protein. Such natural allelic variations can typically result in 1-5% variance in the nucleotide sequence of the NOVX genes. Any and all such nucleotide variations and resulting amino acid polymorphisms in the NOVX polypeptides, which are the result of natural allelic variation and that do not alter the functional activity of the NOVX polypeptides, are intended to be within the scope of the invention.

[0071] Moreover, nucleic acid molecules encoding NOVX proteins from other species, and thus that have a nucleotide sequence that differs from a human SEQ ID NO:2n−1, wherein n is an integer between 1 and 141, are intended to be within the scope of the invention. Nucleic acid molecules corresponding to natural allelic variants and homologues of the NOVX cDNAs of the invention can be isolated based on their homology to the human NOVX nucleic acids disclosed herein using the human cDNAs, or a portion thereof, as a hybridization probe according to standard hybridization techniques under stringent hybridization conditions.

[0072] Accordingly, in another embodiment, an isolated nucleic acid molecule of the invention is at least 6 nucleotides in length and hybridizes under stringent conditions to the nucleic acid molecule comprising the nucleotide sequence of SEQ ID NO:2n−1, wherein n is an integer between 1 and 141. In another embodiment, the nucleic acid is at least 10, 25, 50, 100, 250, 500, 750, 1000, 1500, or 2000 or more nucleotides in length. In yet another embodiment, an isolated nucleic acid molecule of the invention hybridizes to the coding region. As used herein, the term “hybridizes under stringent conditions” is intended to describe conditions for hybridization and washing under which nucleotide sequences at least about 65% homologous to each other typically remain hybridized to each other.

[0073] Homologs (i.e., nucleic acids encoding NOVX proteins derived from species other than human) or other related sequences (e.g., paralogs) can be obtained by low, moderate or high stringency hybridization with all or a portion of the particular human sequence as a probe using methods well known in the art for nucleic acid hybridization and cloning.

[0074] As used herein, the phrase “stringent hybridization conditions” refers to conditions under which a probe, primer or oligonucleotide will hybridize to its target sequence, but to no other sequences. Stringent conditions are sequence-dependent and will be different in different circumstances. Longer sequences hybridize specifically at higher temperatures than shorter sequences. Generally, stringent conditions are selected to be about 5° C. lower than the thermal melting point (Tm) for the specific sequence at a defined ionic strength and pH. The Tm is the temperature (under defined ionic strength, pH and nucleic acid concentration) at which 50% of the probes complementary to the target sequence hybridize to the target sequence at equilibrium. Since the target sequences are generally present at excess, at Tm, 50% of the probes are occupied at equilibrium. Typically, stringent conditions will be those in which the salt concentration is less than about 1.0 M sodium ion, typically about 0.01 to 1.0 M sodium ion (or other salts) at pH 7.0 to 8.3 and the temperature is at least about 30° C. for short probes, primers or oligonucleotides (e.g., 10 nt to 50 nt) and at least about 60° C. for longer probes, primers and oligonucleotides. Stringent conditions may also be achieved with the addition of destabilizing agents, such as formamide.

[0075] Stringent conditions are known to those skilled in the art and can be found in Ausubel, et al., (eds.), CURRENT PROTOCOLS IN MOLECULAR BIOLOGY, John Wiley & Sons, N.Y. (1989), 6.3.1-6.3.6. Preferably, the conditions are such that sequences at least about 65%, 70%, 75%, 85%, 90%, 95%, 98%, or 99% homologous to each other typically remain hybridized to each other. A non-limiting example of stringent hybridization conditions are hybridization in a high salt buffer comprising 6×SSC, 50 mM Tris-HCl (pH 7.5), 1 mM EDTA, 0.02% PVP, 0.02% Ficoll, 0.02% BSA, and 500 mg/ml denatured salmon sperm DNA at 65° C., followed by one or more washes in 0.2×SSC, 0.01% BSA at 50° C. An isolated nucleic acid molecule of the invention that hybridizes under stringent conditions to a sequence of SEQ ID NO:2n−1, wherein n is an integer between 1 and 141, corresponds to a naturally-occurring nucleic acid molecule. As used herein, a “naturally-occurring” nucleic acid molecule refers to an RNA or DNA molecule having a nucleotide sequence that occurs in nature (e.g., encodes a natural protein).

[0076] In a second embodiment, a nucleic acid sequence that is hybridizable to the nucleic acid molecule comprising the nucleotide sequence of SEQ ID NO:2n−1, wherein n is an integer between 1 and 141, or fragments, analogs or derivatives thereof, under conditions of moderate stringency is provided. A non-limiting example of moderate stringency hybridization conditions are hybridization in 6× SSC, 5×Reinhardt's solution, 0.5% SDS and 100 mg/ml denatured salmon sperm DNA at 55° C., followed by one or more washes in 1×SSC, 0.1% SDS at 37° C. Other conditions of moderate stringency that may be used are well-known within the art. See, e.g., Ausubel, et al. (eds.), 1993, CURRENT PROTOCOLS IN MOLECULAR BIOLOGY, John Wiley & Sons, NY, and Krieger, 1990; GENE TRANSFER AND EXPRESSION, A LABORATORY MANUAL, Stockton Press, NY.

[0077] In a third embodiment, a nucleic acid that is hybridizable to the nucleic acid molecule comprising the nucleotide sequences of SEQ ID NO:2n−1, wherein n is an integer between 1 and 141, or fragments, analogs or derivatives thereof, under conditions of low stringency, is provided. A non-limiting example of low stringency hybridization conditions are hybridization in 35% formamide, 5×SSC, 50 mM Tris-HCl (pH 7.5), 5 mM EDTA, 0.02% PVP, 0.02% Ficoll, 0.2% BSA, 100 mg/ml denatured salmon sperm DNA, 10% (wt/vol) dextran sulfate at 40° C., followed by one or more washes in 2×SSC, 25 mM Tris-HCl (pH 7.4), 5 mM EDTA, and 0.1% SDS at 50° C. Other conditions of low stringency that may be used are well known in the art (e.g., as employed for cross-species hybridizations). See, e.g., Ausubel, et al. (eds.), 1993, CURRENT PROTOCOLS IN MOLECULAR BIOLOGY, John Wiley & Sons, NY, and Kriegler, 1990, GENE TRANSFER AND EXPRESSION, A LABORATORY MANUAL, Stockton Press, NY; Shilo and Weinberg, 1981. Proc Natl Acad Sci USA 78: 6789-6792.

[0078] Conservative Mutations

[0079] In addition to naturally-occurring allelic variants of NOVX sequences that may exist in the population, the skilled artisan will further appreciate that changes can be introduced by mutation into the nucleotide sequences of SEQ ID NO:2n−1, wherein n is an integer between 1 and 141, thereby leading to changes in the amino acid sequences of the encoded NOVX protein, without altering the functional ability of that NOVX protein. For example, nucleotide substitutions leading to amino acid substitutions at “non-essential” amino acid residues can be made in the sequence of SEQ ID NO:2n, wherein n is an integer between 1 and 141. A “non-essential” amino acid residue is a residue that can be altered from the wild-type sequences of the NOVX proteins without altering their biological activity, whereas an “essential” amino acid residue is required for such biological activity. For example, amino acid residues that are conserved among the NOVX proteins of the invention are predicted to be particularly non-amenable to alteration. Amino acids for which conservative substitutions can be made are well-known within the art.

[0080] Another aspect of the invention pertains to nucleic acid molecules encoding NOVX proteins that contain changes in amino acid residues that are not essential for activity. Such NOVX proteins differ in amino acid sequence from SEQ ID NO:2n−1, wherein n is an integer between 1 and 141, yet retain biological activity. In one embodiment, the isolated nucleic acid molecule comprises a nucleotide sequence encoding a protein, wherein the protein comprises an amino acid sequence at least about 40% homologous to the amino acid sequences of SEQ ID NO:2n, wherein n is an integer between 1 and 141. Preferably, the protein encoded by the nucleic acid molecule is at least about 60% homologous to SEQ ID NO:2n, wherein n is an integer between 1 and 141; more preferably at least about 70% homologous to SEQ ID NO:2n, wherein n is an integer between 1 and 141; still more preferably at least about 80% homologous to SEQ ID NO:2n, wherein n is an integer between 1 and 141; even more preferably at least about 90% homologous to SEQ ID NO:2n, wherein n is an integer between 1 and 141; and most preferably at least about 95% homologous to SEQ ID NO:2n, wherein n is an integer between 1 and 141.

[0081] An isolated nucleic acid molecule encoding a NOVX protein homologous to the protein of SEQ ID NO:2n, wherein n is an integer between 1 and 141, can be created by introducing one or more nucleotide substitutions, additions or deletions into the nucleotide sequence of SEQ ID NO:2n−1, wherein n is an integer between 1 and 141, such that one or more amino acid substitutions, additions or deletions are introduced into the encoded protein.

[0082] Mutations can be introduced any one of SEQ ID NO:2n−1, wherein n is an integer between 1 and 141, by standard techniques, such as site-directed mutagenesis and PCR-mediated mutagenesis. Preferably, conservative amino acid substitutions are made at one or more predicted, non-essential amino acid residues. A “conservative amino acid substitution” is one in which the amino acid residue is replaced with an amino acid residue having a similar side chain. Families of amino acid residues having similar side chains have been defined within the art. These families include amino acids with basic side chains (e.g., lysine, arginine, histidine), acidic side chains (e.g., aspartic acid, glutamic acid), uncharged polar side chains (e.g., glycine, asparagine, glutamine, serine, threonine, tyrosine, cysteine), nonpolar side chains (e.g., alanine, valine, leucine, isoleucine, proline, phenylalanine, methionine, tryptophan), beta-branched side chains (e.g., threonine, valine, isoleucine) and aromatic side chains (e.g., tyrosine, phenylalanine, tryptophan, histidine). Thus, a predicted non-essential amino acid residue in the NOVX protein is replaced with another amino acid residue from the same side chain family. Alternatively, in another embodiment, mutations can be introduced randomly along all or part of a NOVX coding sequence, such as by saturation mutagenesis, and the resultant mutants can be screened for NOVX biological activity to identify mutants that retain activity. Following mutagenesis of a nucleic acid of SEQ ID NO:2n−1, wherein n is an integer between 1 and 141, the encoded protein can be expressed by any recombinant technology known in the art and the activity of the protein can be determined.

[0083] The relatedness of amino acid families may also be determined based on side chain interactions. Substituted amino acids may be fully conserved “strong” residues or fully conserved “weak” residues. The “strong” group of conserved amino acid residues may be any one of the following groups: STA, NEQK, NHQK, NDEQ, QHRK, MILV, MILF, HY, FYW, wherein the single letter amino acid codes are grouped by those amino acids that may be substituted for each other. Likewise, the “weak” group of conserved residues may be any one of the following: CSA, ATV, SAG, STNK, STPA, SGND, SNDEQK, NDEQHK, NEQHRK, HFY, wherein the letters within each group represent the single letter amino acid code.

[0084] In one embodiment, a mutant NOVX protein can be assayed for (i) the ability to form protein:protein interactions with other NOVX proteins, other cell-surface proteins, or biologically-active portions thereof, (ii) complex formation between a mutant NOVX protein and a NOVX ligand; or (iii) the ability of a mutant NOVX protein to bind to an intracellular target protein or biologically-active portion thereof; (e.g. avidin proteins).

[0085] In yet another embodiment, a mutant NOVX protein can be assayed for the ability to regulate a specific biological function (e.g., regulation of insulin release).

[0086] Interfering RNA

[0087] In one aspect of the invention, NOVX gene expression can be attenuated by RNA interference. One approach well-known in the art is short interfering RNA (siRNA) mediated gene silencing where expression products of a NOVX gene are targeted by specific double stranded NOVX derived siRNA nucleotide sequences that are complementary to at least a 19-25 nt long segment of the NOVX gene transcript, including the 5′ untranslated (UT) region, the ORF, or the 3′ UT region. See, e.g., PCT applications WO00/44895, WO99/32619, WO01/75164, WO01/92513, WO01/29058, WO01/89304, WO02/16620, and WO02/29858, each incorporated by reference herein in their entirety. Targeted genes can be a NOVX gene, or an upstream or downstream modulator of the NOVX gene. Nonlimiting examples of upstream or downstream modulators of a NOVX gene include, e.g., a transcription factor that binds the NOVX gene promoter, a kinase or phosphatase that interacts with a NOVX polypeptide, and polypeptides involved in a NOVX regulatory pathway.

[0088] According to the methods of the present invention, NOVX gene expression is silenced using short interfering RNA. A NOVX polynucleotide according to the invention includes a siRNA polynucleotide. Such a NOVX siRNA can be obtained using a NOVX polynucleotide sequence, for example, by processing the NOVX ribopolynucleotide sequence in a cell-free system, such as but not limited to a Drosophila extract, or by transcription of recombinant double stranded NOVX RNA or by chemical synthesis of nucleotide sequences homologous to a NOVX sequence. See, e.g., Tuscbl, Zamore, Lehmann, Bartel and Sharp (1999), Genes & Dev. 13: 3191-3197, incorporated herein by reference in its entirety. When synthesized, a typical 0.2 micromolar-scale RNA synthesis provides about 1 milligram of siRNA, which is sufficient for 1000 transfection experiments using a 24-well tissue culture plate format.

[0089] The most efficient silencing is generally observed with siRNA duplexes composed of a 21-nt sense strand and a 21-nt antisense strand, paired in a manner to have a 2-nt 3′ overhang. The sequence of the 2-nt 3′ overhang makes an additional small contribution to the specificity of siRNA target recognition. The contribution to specificity is localized to the unpaired nucleotide adjacent to the first paired bases. In one embodiment, the nucleotides in the 3′ overhang are ribonucleotides. In an alternative embodiment, the nucleotides in the 3′ overhang are deoxyribonucleotides. Using 2′-deoxyribonucleotides in the 3′ overhangs is as efficient as using ribonucleotides, but deoxyribonucleotides are often cheaper to synthesize and are most likely more nuclease resistant.

[0090] A contemplated recombinant expression vector of the invention comprises a NOVX DNA molecule cloned into an expression vector comprising operatively-linked regulatory sequences flanking the NOVX sequence in a manner that allows for expression (by transcription of the DNA molecule) of both strands. An RNA molecule that is antisense to NOVX mRNA is transcribed by a first promoter (e.g., a promoter sequence 3′ of the cloned DNA) and an RNA molecule that is the sense strand for the NOVX mRNA is transcribed by a second promoter (e.g., a promoter sequence 5′ of the cloned DNA). The sense and antisense strands may hybridize in vivo to generate siRNA constructs for silencing of the NOVX gene. Alternatively, two constructs can be utilized to create the sense and anti-sense strands of a siRNA construct. Finally, cloned DNA can encode a construct having secondary structure, wherein a single transcript has both the sense and complementary antisense sequences from the target gene or genes. In an example of this embodiment, a hairpin RNAi product is homologous to all or a portion of the target gene. In another example, a hairpin RNAi product is a siRNA. The regulatory sequences flanking the NOVX sequence may be identical or may be different, such that their. expression may be modulated independently, or in a temporal or spatial manner.

[0091] In a specific embodiment, siRNAs are transcribed intracellularly by cloning the NOVX gene templates into a vector containing, e.g., a RNA pol III transcription unit from the smaller nuclear RNA (snRNA) U6 or the human RNase P RNA H1. One example of a vector system is the GeneSuppressor™ RNA Interference kit (commercially available from Imgenex). The U6 and H1 promoters are members of the type III class of Pol III promoters. The +1 nucleotide of the U6-like promoters is always guanosine, whereas the +1 for H1 promoters is adenosine. The termination signal for these promoters is defined by five consecutive thymidines. The transcript is typically cleaved after the second uridine. Cleavage at this position generates a 3′ UU overhang in the expressed siRNA, which is similar to the 3′ overhangs of synthetic siRNAs. Any sequence less than 400 nucleotides in length can be transcribed by these promoter, therefore they are ideally suited for the expression of around 21-nucleotide siRNAs in, e.g., an approximately 50-nucleotide RNA stem-loop transcript.

[0092] A siRNA vector appears to have an advantage over synthetic siRNAs where long term knock-down of expression is desired. Cells transfected with a siRNA expression vector would experience steady, long-term mRNA inhibition. In contrast, cells transfected with exogenous synthetic siRNAs typically recover from mRNA suppression within seven days or ten rounds of cell division. The long-term gene silencing ability of siRNA expression vectors may provide for applications in gene therapy.

[0093] In general, siRNAs are chopped from longer dsRNA by an ATP-dependent ribonuclease called DICER. DICER is a member of the RNase III family of double-stranded RNA-specific endonucleases. The siRNAs assemble with cellular proteins into an endonuclease complex. In vitro studies in Drosophila suggest that the siRNAs/protein complex (siRNP) is then transferred to a second enzyme complex, called an RNA-induced silencing complex (RISC), which contains an endoribonuclease that is distinct from DICER. RISC uses the sequence encoded by the antisense siRNA strand to find and destroy mRNAs of complementary sequence. The siRNA thus acts as a guide, restricting the ribonuclease to cleave only mRNAs complementary to one of the two siRNA strands.

[0094] A NOVX mRNA region to be targeted by siRNA is generally selected from a desired NOVX sequence beginning 50 to 100 nt downstream of the start codon. Alternatively, 5′ or 3′ UTRs and regions nearby the start codon can be used but are generally avoided, as these may be richer in regulatory protein binding sites. UTR-binding proteins and/or translation initiation complexes may interfere with binding of the siRNP or RISC endonuclease complex. An initial BLAST homology search for the selected siRNA sequence is done against an available nucleotide sequence library to ensure that only one gene is targeted. Specificity of target recognition by siRNA duplexes indicate that a single point mutation located in the paired region of an siRNA duplex is sufficient to abolish target mRNA degradation. See, Elbashir et al. 2001 EMBO J. 20(23):6877-88. Hence, consideration should be taken to accommodate SNPs, polymorphisms, allelic variants or species-specific variations when targeting a desired gene.

[0095] In one embodiment, a complete NOVX siRNA experiment includes the proper negative control. A negative control siRNA generally has the same nucleotide composition as the NOVX siRNA but lack significant sequence homology to the genome. Typically, one would scramble the nucleotide sequence of the NOVX siRNA and do a homology search to make sure it lacks homology to any other gene.

[0096] Two independent NOVX siRNA duplexes can be used to knock-down a target NOVX gene. This helps to control for specificity of the silencing effect. In addition, expression of two independent genes can be simultaneously knocked down by using equal concentrations of different NOVX siRNA duplexes, e.g., a NOVX siRNA and an siRNA for a regulator of a NOVX gene or polypeptide. Availability of siRNA-associating proteins is believed to be more limiting than target mRNA accessibility.

[0097] A targeted NOVX region is typically a sequence of two adenines (AA) and two thymidines (TT) divided by a spacer region of nineteen (N 19) residues (e.g., AA(N19)TT). A desirable spacer region has a G/C-content of approximately 30% to 70%, and more preferably of about 50%. If the sequence AA(N19)TT is not present in the target sequence, an alternative target region would be AA(N21). The sequence of the NOVX sense siRNA corresponds to (N19)TT or N21, respectively. In the latter case, conversion of the 3′ end of the sense siRNA to TT can be performed if such a sequence does not naturally occur in the NOVX polynucleotide. The rationale for this sequence conversion is to generate a symmetric duplex with respect to the sequence composition of the sense and antisense 3′ overhangs. Symmetric 3′ overhangs may help to ensure that the siRNPs are formed with approximately equal ratios of sense and antisense target RNA-cleaving siRNPs. See, e.g., Elbashir, Lendeckel and Tuschl (2001). Genes & Dev. 15: 188-200, incorporated by reference herein in its entirely. The modification of the overhang of the sense sequence of the siRNA duplex is not expected to affect targeted mRNA recognition, as the antisense siRNA strand guides target recognition.

[0098] Alternatively, if the NOVX target mRNA does not contain a suitable AA(N21) sequence, one may search for the sequence NA(N21). Further, the sequence of the sense strand and antisense strand may still be synthesized as 5′ (N19)TT, as it is believed that the sequence of the 3′-most nucleotide of the antisense siRNA does not contribute to specificity. Unlike antisense or ribozyme technology, the secondary structure of the target mRNA does not appear to have a strong effect on silencing. See, Harborth, et al. (2001) J. Cell Science 114: 4557-4565, incorporated by reference in its entirety.

[0099] Transfection of NOVX siRNA duplexes can be achieved using standard nucleic acid transfection methods, for example, OLIGOFECTAMINE Reagent (commercially available from Invitrogen). An assay for NOVX gene silencing is generally performed approximately 2 days after transfection. No NOVX gene silencing has been observed in the absence of transfection reagent, allowing for a comparative analysis of the wild-type and silenced NOVX phenotypes. In a specific embodiment, for one well of a 24-well plate, approximately 0.84 μg of the siRNA duplex is generally sufficient. Cells are typically seeded the previous day, and are transfected at about 50% confluence. The choice of cell culture media and conditions are routine to those of skill in the art, and will vary with the choice of cell type. The efficiency of transfection may depend on the cell type, but also on the passage number and the confluency of the cells. The time and the manner of formation of siRNA-liposome complexes (e.g. inversion versus vortexing) are also critical. Low transfection efficiencies are the most frequent cause of unsuccessful NOVX silencing. The efficiency of transfection needs to be carefully examined for each new cell line to be used. Preferred cell are derived from a mammal, more preferably from a rodent such as a rat or mouse, and most preferably from a human. Where used for therapeutic treatment, the cells are preferentially autologous, although non-autologous cell sources are also contemplated as within the scope of the present invention.

[0100] For a control experiment, transfection of 0.84 μg single-stranded sense NOVX siRNA will have no effect on NOVX silencing, and 0.84 μg antisense siRNA has a weak silencing effect when compared to 0.84 μg of duplex siRNAs. Control experiments again allow for a comparative analysis of the wild-type and silenced NOVX phenotypes. To control for transfection efficiency, targeting of common proteins is typically performed, for example targeting of lamin A/C or transfection of a CMV-driven EGFP-expression plasmid (e.g. commercially available from Clontech). In the above example, a determination of the fraction of lamin A/C knockdown in cells is determined the next day by such techniques as immunofluorescence, Western blot, Northern blot or other similar assays for protein expression or gene expression. Lamin A/C monoclonal antibodies may be obtained from Santa Cruz Biotechnology.

[0101] Depending on the abundance and the half life (or turnover) of the targeted NOVX polynucleotide in a cell, a knock-down phenotype may become apparent after 1 to 3 days, or even later. In cases where no NOVX knock-down phenotype is observed, depletion of the NOVX polynucleotide may be observed by immunofluorescence or Western blotting. If the NOVX polynucleotide is still abundant after 3 days, cells need to be split and transferred to a fresh 24-well plate for re-transfection. If no knock-down of the targeted protein is observed, it may be desirable to analyze whether the target mRNA (NOVX or a NOVX upstream or downstream gene) was effectively destroyed by the transfected siRNA duplex. Two days after transfection, total RNA is prepared, reverse transcribed using a target-specific primer, and PCR-amplified with a primer pair covering at least one exon-exon junction in order to control for amplification of pre-mRNAs. RT/PCR of a non-targeted mRNA is also needed as control. Effective depletion of the mRNA yet undetectable reduction of target protein may indicate that a large reservoir of stable NOVX protein may exist in the cell. Multiple transfection in sufficiently long intervals may be necessary until the target protein is finally depleted to a point where a phenotype may become apparent. If multiple transfection steps are required, cells are split 2 to 3 days after transfection. The cells may be transfected immediately after splitting.

[0102] An inventive therapeutic method of the invention contemplates administering a NOVX siRNA construct as therapy to compensate for increased or aberrant NOVX expression or activity. The NOVX ribopolynucleotide is obtained and processed into siRNA fragments, or a NOVX siRNA is synthesized, as described above. The NOVX siRNA is administered to cells or tissues using known nucleic acid transfection techniques, as described above. A NOVX siRNA specific for a NOVX gene will decrease or knockdown NOVX transcription products, which will lead to reduced NOVX polypeptide production, resulting in reduced NOVX polypeptide activity in the cells or tissues.

[0103] The present invention also encompasses a method of treating a disease or condition associated with the presence of a NOVX protein in an individual comprising administering to the individual an RNAi construct that targets the mRNA of the protein (the mRNA that encodes the protein) for degradation. A specific RNAi construct includes a siRNA or a double stranded gene transcript that is processed into siRNAs. Upon treatment, the target protein is not produced or is not produced to the extent it would be in the absence of the treatment.

[0104] Where the NOVX gene function is not correlated with a known phenotype, a control sample of cells or tissues from healthy individuals provides a reference standard for determining NOVX expression levels. Expression levels are detected using the assays described, e.g., RT-PCR, Northern blotting, Western blotting, ELISA, and the like. A subject sample of cells or tissues is taken from a mammal, preferably a human subject, suffering from a disease state. The NOVX ribopolynucleotide is used to produce siRNA constructs, that are specific for the NOVX gene product. These cells or tissues are treated by administering NOVX siRNA's to the cells or tissues by methods described for the transfection of nucleic acids into a cell or tissue, and a change in NOVX polypeptide or polynucleotide expression is observed in the subject sample relative to the control sample, using the assays described. This NOVX gene knockdown approach provides a rapid method for determination of a NOVX minus (NOVX⁻) phenotype in the treated subject sample. The NOVX⁻ phenotype observed in the treated subject sample thus serves as a marker for monitoring the course of a disease state during treatment.

[0105] In specific embodiments, a NOVX siRNA is used in therapy. Methods for the generation and use of a NOVX siRNA are known to those skilled in the art. Example techniques are provided below.

[0106] Production of RNAs

[0107] Sense RNA (ssRNA) and antisense RNA (asRNA) of NOVX are produced using known methods such as transcription in RNA expression vectors. In the initial experiments, the sense and antisense RNA are about 500 bases in length each. The produced ssRNA and asRNA (0.5 μM) in 10 mM Tris-HCl (pH 7.5) with 20 mM NaCl were heated to 95° C. for 1 min then cooled and annealed at room temperature for 12 to 16 h. The RNAs are precipitated and resuspended in lysis buffer (below). To monitor annealing, RNAs are electrophoresed in a 2% agarose gel in TBE buffer and stained with ethidium bromide. See, e.g., Sambrook et al., Molecular Cloning. Cold Spring Harbor Laboratory Press, Plainview, N.Y. (1989).

[0108] Lysate Preparation

[0109] Untreated rabbit reticulocyte lysate (Ambion) are assembled according to the manufacturer's directions. dsRNA is incubated in the lysate at 30° C. for 10 min prior to the addition of mRNAs. Then NOVX mRNAs are added and the incubation continued for an additional 60 min. The molar ratio of double stranded RNA and mRNA is about 200:1. The NOVX mRNA is radiolabeled (using known techniques) and its stability is monitored by gel electrophoresis.

[0110] In a parallel experiment made with the same conditions, the double stranded RNA is internally radiolabeled with a ³²P-ATP. Reactions are stopped by the addition of 2× proteinase K buffer and deproteinized as described previously (Tuschl et al., Genes Dev., 13:3191-3197 (1999)). Products are analyzed by electrophoresis in 15% or 18% polyacrylamide sequencing gels using appropriate RNA standards. By monitoring the gels for radioactivity, the natural production of 10 to 25 nt RNAs from the double stranded RNA can be determined.

[0111] The band of double stranded RNA, about 21-23 bps, is eluded. The efficacy of these 21-23 mers for suppressing NOVX transcription is assayed in vitro using the same rabbit reticulocyte assay described above using 50 nanomolar of double stranded 21-23 mer for each assay. The sequence of these 21-23 mers is then determined using standard nucleic acid sequencing techniques.

[0112] RNA Preparation

[0113] 21 nt RNAs, based on the sequence determined above, are chemically synthesized using Expedite RNA phosphoramidites and thymidine phosphoramidite (Proligo, Germany). Synthetic oligonucleotides are deprotected and gel-purified (Elbashir, Lendeckel, & Tuschl, Genes & Dev. 15, 188-200 (2001)), followed by Sep-Pak C18 cartridge (Waters, Milford, Mass., USA) purification (Tuschl, et al., Biochemistry, 32:11658-11668 (1993)).

[0114] These RNAs (20 μM) single strands are incubated in annealing buffer (100 mM potassium acetate, 30 mM HEPES-KOH at pH 7.4, 2 mM magnesium acetate) for 1 min at 90° C. followed by 1 h at 37° C.

[0115] Cell Culture

[0116] A cell culture known in the art to regularly express NOVX is propagated using standard conditions. 24 hours before transfection, at approx. 80% confluency, the cells are trypsinized and diluted 1:5 with fresh medium without antibiotics (1-3×105 cells/ml) and transferred to 24-well plates (500 ml/well). Transfection is performed using a commercially available lipofection kit and NOVX expression is monitored using standard techniques with positive and negative control. A positive control is cells that naturally express NOVX while a negative control is cells that do not express NOVX. Base-paired 21 and 22 nt siRNAs with overhanging 3′ ends mediate efficient sequence-specific mRNA degradation in lysates and in cell culture. Different concentrations of siRNAs are used. An efficient concentration for suppression in vitro in mammalian culture is between 25 nM to 100 nM final concentration. This indicates that siRNAs are effective at concentrations that are several orders of magnitude below the concentrations applied in conventional antisense or ribozyme gene targeting experiments.

[0117] The above method provides a way both for the deduction of NOVX siRNA sequence and the use of such siRNA for in vitro suppression. In vivo suppression may be performed using the same siRNA using well known in vivo transfection or gene therapy transfection techniques.

[0118] Antisense Nucleic Acids

[0119] Another aspect of the invention pertains to isolated antisense nucleic acid molecules that are hybridizable to or complementary to the nucleic acid molecule comprising the nucleotide sequence of SEQ ID NO:2n−1, wherein n is an integer between 1 and 141, or fragments, analogs or derivatives thereof. An “antisense” nucleic acid comprises a nucleotide sequence that is complementary to a “sense” nucleic acid encoding a protein (e.g., complementary to the coding strand of a double-stranded cDNA molecule or complementary to an mRNA sequence). In specific aspects, antisense nucleic acid molecules are provided that comprise a sequence complementary to at least about 10, 25, 50, 100, 250 or 500 nucleotides or an entire NOVX coding strand, or to only a portion thereof. Nucleic acid molecules encoding fragments, homologs, derivatives and analogs of a NOVX protein of SEQ ID NO:2n, wherein n is an integer between 1 and 141, or antisense nucleic acids complementary to a NOVX nucleic acid sequence of SEQ ID NO:2n−1, wherein n is an integer between 1 and 141, are additionally provided.

[0120] In one embodiment, an antisense nucleic acid molecule is antisense to a “coding region” of the coding strand of a nucleotide sequence encoding a NOVX protein. The term “coding region” refers to the region of the nucleotide sequence comprising codons which are translated into amino acid residues. In another embodiment, the antisense nucleic acid molecule is antisense to a “noncoding region” of the coding strand of a nucleotide sequence encoding the NOVX protein. The term “noncoding region” refers to 5′ and 3′ sequences which flank the coding region that are not translated into amino acids (i.e., also referred to as 5′ and 3′ untranslated regions).

[0121] Given the coding strand sequences encoding the NOVX protein disclosed herein, antisense nucleic acids of the invention can be designed according to the rules of Watson and Crick or Hoogsteen base pairing. The antisense nucleic acid molecule can be complementary to the entire coding region of NOVX mRNA, but more preferably is an oligonucleotide that is antisense to only a portion of the coding or noncoding region of NOVX mRNA. For example, the antisense oligonucleotide can be complementary to the region surrounding the translation start site of NOVX mRNA. An antisense oligonucleotide can be, for example, about 5, 10, 15, 20, 25, 30, 35, 40, 45 or 50 nucleotides in length. An antisense nucleic acid of the invention can be constructed using chemical synthesis or enzymatic ligation reactions using procedures known in the art. For example, an antisense nucleic acid (e.g., an antisense oligonucleotide) can be chemically synthesized using naturally-occurring nucleotides or variously modified nucleotides designed to increase the biological stability of the molecules or to increase the physical stability of the duplex formed between the antisense and sense nucleic acids (e.g., phosphorothioate derivatives and acridine substituted nucleotides can be used).

[0122] Examples of modified nucleotides that can be used to generate the antisense nucleic acid include: 5-fluorouracil, 5-bromouracil, 5-chlorouracil, 5-iodouracil, hypoxanthine, xanthine, 4-acetylcytosine, 5-carboxymethylaminomethyl-2-thiouridine, 5-(carboxyhydroxylmethyl) uracil, 5-carboxymethylaminomethyluracil, dihydrouracil, beta-D-galactosylqueosine, inosine, N6-isopentenyladenine, 1-methylguanine, 1-methylinosine, 2,2-dimethylguanine, 2-methyladenine, 2-methyl guanine, 5-methoxyuracil, 3-methylcytosine, 5-methylcytosine, N6-adenine, 7-methylguanine, 5-methylaminomethyluracil, 5-methoxyaminomethyl-2-thiouracil, 2-thiouracil, 4-thiouracil, beta-D-mannosylqueosine, 5′-methoxycarboxymethyluracil, 2-methylthio-N6-isopentenyladenine, uracil-5-oxyacetic acid (v), wybutoxosine, pseudouracil, queosine, 2-thiocytosine, 5-methyl-2-thiouracil, 5-methyluracil, uracil-5-oxyacetic acid methylester, uracil-5-oxyacetic acid (v), 5-methyl-2-thiouracil, 3-(3-amino-3-N-2-carboxypropyl) uracil, (acp3)w, and 2,6-diaminopurine. Alternatively, the antisense nucleic acid can be produced biologically using an expression vector into which a nucleic acid has been subcloned in an antisense orientation (i.e., RNA transcribed from the inserted nucleic acid will be of an antisense orientation to a target nucleic acid of interest, described further in the following subsection).

[0123] The antisense nucleic acid molecules of the invention are typically administered to a subject or generated in situ such that they hybridize with or bind to cellular mRNA and/or genomic DNA encoding a NOVX protein to thereby inhibit expression of the protein (e.g., by inhibiting transcription and/or translation). The hybridization can be by conventional nucleotide complementarity to form a stable duplex, or, for example, in the case of an antisense nucleic acid molecule that binds to DNA duplexes, through specific interactions in the major groove of the double helix. An example of a route of administration of antisense nucleic acid molecules of the invention includes direct injection at a tissue site. Alternatively, antisense nucleic acid molecules can be modified to target selected cells and then administered systemically. For example, for systemic administration, antisense molecules can be modified such that they specifically bind to receptors or antigens expressed on a selected cell surface (e.g., by linking the antisense nucleic acid molecules to peptides or antibodies that bind to cell surface receptors or antigens). The antisense nucleic acid molecules can also be delivered to cells using the vectors described herein. To achieve sufficient nucleic acid molecules, vector constructs in which the antisense nucleic acid molecule is placed under the control of a strong pol II or pol III promoter are preferred.

[0124] In yet another embodiment, the antisense nucleic acid molecule of the invention is an α-anomeric nucleic acid molecule. An α-anomeric nucleic acid molecule forms specific double-stranded hybrids with complementary RNA in which, contrary to the usual β-units, the strands run parallel to each other. See, e.g., Gaultier, et al., 1987. Nucl. Acids Res. 15: 6625-6641. The antisense nucleic acid molecule can also comprise a 2′-o-methylribonucleotide (See, e.g., Inoue, et al. 1987. Nucl. Acids Res. 15: 6131-6148) or a chimeric RNA-DNA analogue (See, e.g., Inoue, et al., 1987. FEBS Lett. 215: 327-330.

[0125] Ribozymes and PNA Moieties

[0126] Nucleic acid modifications include, by way of non-limiting example, modified bases, and nucleic acids whose sugar phosphate backbones are modified or derivatized. These modifications are carried out at least in part to enhance the chemical stability of the modified nucleic acid, such that they may be used, for example, as antisense binding nucleic acids in therapeutic applications in a subject.

[0127] In one embodiment, an antisense nucleic acid of the invention is a ribozyme. Ribozymes are catalytic RNA molecules with ribonuclease activity that are capable of cleaving a single-stranded nucleic acid, such as an mRNA, to which they have a complementary region. Thus, ribozymes (e.g., hammerhead ribozymes as described in Haselhoff and Gerlach 1988. Nature 334: 585-591) can be used to catalytically cleave NOVX mRNA transcripts to thereby inhibit translation of NOVX mRNA. A ribozyme having specificity for a NOVX-encoding nucleic acid can be designed based upon the nucleotide sequence of a NOVX cDNA disclosed herein (i.e., SEQ ID NO:2n−1, wherein n is an integer between 1 and 141). For example, a derivative of a Tetrahymena L-19 IVS RNA can be constructed in which the nucleotide sequence of the active site is complementary to the nucleotide sequence to be cleaved in a NOVX-encoding mRNA. See, e.g., U.S. Pat. No. 4,987,071 to Cech, et al. and U.S. Pat. No. 5,116,742 to Cech, et al. NOVX mRNA can also be used to select a catalytic RNA having a specific ribonuclease activity from a pool of RNA molecules. See, e.g., Bartel et al., (1993) Science 261:1411-1418.

[0128] Alternatively, NOVX gene expression can be inhibited by targeting nucleotide sequences complementary to the regulatory region of the NOVX nucleic acid (e.g., the NOVX promoter and/or enhancers) to form triple helical structures that prevent transcription of the NOVX gene in target cells. See, e.g., Helene, 1991. Anticancer Drug Des. 6: 569-84; Helene, et al. 1992. Ann. N.Y Acad. Sci. 660: 27-36; Maher, 1992. Bioassays 14: 807-15.

[0129] In various embodiments, the NOVX nucleic acids can be modified at the base moiety, sugar moiety or phosphate backbone to improve, e.g., the stability, hybridization, or solubility of the molecule. For example, the deoxyribose phosphate backbone of the nucleic acids can be modified to generate peptide nucleic acids. See, e.g., Hyrup, et al., 1996. Bioorg Med Chem 4: 5-23. As used herein, the terms “peptide nucleic acids” or “PNAs” refer to nucleic acid mimics (e.g., DNA mimics) in which the deoxyribose phosphate backbone is replaced by a pseudopeptide backbone and only the four natural nucleotide bases are retained. The neutral backbone of PNAs has been shown to allow for specific hybridization to DNA and RNA under conditions of low ionic strength. The synthesis of PNA oligomer can be performed using standard solid phase peptide synthesis protocols as described in Hyrup, et al., 1996. supra; Perry-O'Keefe, et al., 1996. Proc. Natl. Acad. Sci. USA 93: 14670-14675.

[0130] PNAs of NOVX can be used in therapeutic and diagnostic applications. For example, PNAs can be used as antisense or antigene agents for sequence-specific modulation of gene expression by, e.g., inducing transcription or translation arrest or inhibiting replication. PNAs of NOVX can also bemused, for example, in the analysis of single base pair mutations in a gene (e.g., PNA directed PCR clamping; as artificial restriction enzymes when used in combination with other enzymes, e.g., S₁ nucleases (See, Hyrup, et al., 1996.supra); or as probes or primers for DNA sequence and hybridization (See, Hyrup, et al., 1996, supra; Perry-O'Keefe, et al., 1996. supra).

[0131] In another embodiment, PNAs of NOVX can be modified, e.g., to enhance their stability or cellular uptake, by attaching lipophilic or other helper groups to PNA, by the formation of PNA-DNA chimeras, or by the use of liposomes or other techniques of drug delivery known in the art. For example, PNA-DNA chimeras of NOVX can be generated that may combine the advantageous properties of PNA and DNA. Such chimeras allow DNA recognition enzymes (e.g., RNase H and DNA polymerases) to interact with the DNA portion while the PNA portion would provide high binding affinity and specificity. PNA-DNA chimeras can be linked using linkers of appropriate lengths selected in terms of base stacking, number of bonds between the nucleotide bases, and orientation (see, Hyrup, et al., 1996. supra). The synthesis of PNA-DNA chimeras can be performed as described in Hyrup, et al., 1996. supra and Finn, et al., 1996. Nucl Acids Res 24: 3357-3363. For example, a DNA chain can be synthesized on a solid support using standard phosphoramidite coupling chemistry, and modified nucleoside analogs, e.g., 5′-(4-methoxytrityl)amino-5′-deoxy-thymidine phosphoramidite, can be used between the PNA and the 5′ end of DNA. See, e.g., Mag, et al., 1989. Nucl Acid Res 17: 5973-5988. PNA monomers are then coupled in a stepwise manner to produce a chimeric molecule with a 5′ PNA segment and a 3′ DNA segment. See, e.g., Finn, et al., 1996. supra. Alternatively, chimeric molecules can be synthesized with a 5′ DNA segment and a 3′ PNA segment. See, e.g., Petersen, et al., 1975. Bioorg. Med. Chem. Lett. 5: 1119-11124.

[0132] In other embodiments, the oligonucleotide may include other appended groups such as peptides (e.g., for targeting host cell receptors in vivo), or agents facilitating transport across the cell membrane (see, e.g., Letsinger, et al., 1989. Proc. Natl. Acad. Sci. U.S.A. 86: 6553-6556; Lemaitre, et al., 1987. Proc. Natl. Acad. Sci. 84: 648-652; PCT Publication No. WO88/09810) or the blood-brain barrier (see, e.g., PCT Publication No. WO 89/10134). In addition, oligonucleotides can be modified with hybridization triggered cleavage agents (see, e.g., Krol, et al., 1988. BioTechniques 6:958-976) or intercalating agents (see, e.g., Zon, 1988. Pharm. Res. 5: 539-549). To this end, the oligonucleotide may be conjugated to another molecule, e.g., a peptide, a hybridization triggered cross-linking agent, a transport agent, a hybridization-triggered cleavage agent, and the like.

[0133] NOVX Polypeptides

[0134] A polypeptide according to the invention includes a polypeptide including the amino acid sequence of NOVX polypeptides whose sequences are provided in any one of SEQ ID NO:2n, wherein n is an integer between 1 and 141. The invention also includes a mutant or variant protein any of whose residues may be changed from the corresponding residues shown in any one of SEQ ID NO:2n, wherein n is an integer between 1 and 141, while still encoding a protein that maintains its NOVX activities and physiological functions, or a functional fragment thereof.

[0135] In general, a NOVX variant that preserves NOVX-like function includes any variant in which residues at a particular position in the sequence have been substituted by other amino acids, and further include the possibility of inserting an additional residue or residues between two residues of the parent protein as well as the possibility of deleting one or more residues from the parent sequence. Any amino acid substitution, insertion, or deletion is encompassed by the invention. In favorable circumstances, the substitution is a conservative substitution as defined above.

[0136] One aspect of the invention pertains to isolated NOVX proteins, and biologically-active portions thereof, or derivatives, fragments, analogs or homologs thereof. Also provided are polypeptide fragments suitable for use as immunogens to raise anti-NOVX antibodies. In one embodiment, native NOVX proteins can be isolated from cells or tissue sources by an appropriate purification scheme using standard protein purification techniques. In another embodiment, NOVX proteins are produced by recombinant DNA techniques. Alternative to recombinant expression, a NOVX protein or polypeptide can be synthesized chemically using standard peptide synthesis techniques.

[0137] An “isolated” or “purified” polypeptide or protein or biologically-active portion thereof is substantially free of cellular material or other contaminating proteins from the cell or tissue source from which the NOVX protein is derived, or substantially free from chemical precursors or other chemicals when chemically synthesized. The language “substantially free of cellular material” includes preparations of NOVX proteins in which the protein is separated from cellular components of the cells from which it is isolated or recombinantly-produced. In one embodiment, the language “substantially free of cellular material” includes preparations of NOVX proteins having less than about 30% (by dry weight) of non-NOVX proteins (also referred to herein as a “contaminating protein”), more preferably less than about 20% of non-NOVX proteins, still more preferably less than about 10% of non-NOVX proteins, and most preferably less than about 5% of non-NOVX proteins. When the NOVX protein or biologically-active portion thereof is recombinantly-produced, it is also preferably substantially free of culture medium, i.e., culture medium represents less than about 20%, more preferably less than about 10%, and most preferably less than about 5% of the volume of the NOVX protein preparation.

[0138] The language “substantially free of chemical precursors or other chemicals” includes preparations of NOVX proteins in which the protein is separated from chemical precursors or other chemicals that are involved in the synthesis of the protein. In one embodiment, the language “substantially free of chemical precursors or other chemicals” includes preparations of NOVX proteins having less than about 30% (by dry weight) of chemical precursors or non-NOVX chemicals, more preferably less than about 20% chemical precursors or non-NOVX chemicals, still more preferably less than about 10% chemical precursors or non-NOVX chemicals, and most preferably less than about 5% chemical precursors or non-NOVX chemicals.

[0139] Biologically-active portions of NOVX proteins include peptides comprising amino acid sequences sufficiently homologous to or derived from the amino acid sequences of the NOVX proteins (e.g., the amino acid sequence of SEQ ID NO:2n, wherein n is an integer between 1 and 141) that include fewer amino acids than the full-length NOVX proteins, and exhibit at least one activity of a NOVX protein. Typically, biologically-active portions comprise a domain or motif with at least one activity of the NOVX protein. A biologically-active portion of a NOVX protein can be a polypeptide which is, for example, 10, 25, 50, 100 or more amino acid residues in length.

[0140] Moreover, other biologically-active portions, in which other regions of the protein are deleted, can be prepared by recombinant techniques and evaluated for one or more of the functional activities of a native NOVX protein.

[0141] In an embodiment, the NOVX protein has an amino acid sequence of SEQ ID NO:2n, wherein n is an integer between 1 and 141. In other embodiments, the NOVX protein is substantially homologous to SEQ ID NO:2n, wherein n is an integer between 1 and 141, and retains the functional activity of the protein of SEQ ID NO:2n, wherein n is an integer between 1 and 141, yet differs in amino acid sequence due to natural allelic variation or mutagenesis, as described in detail, below. Accordingly, in another embodiment, the NOVX protein is a protein that comprises an amino acid sequence at least about 45% homologous to the amino acid sequence of SEQ ID NO:2n, wherein n is an integer between 1 and 141, and retains the functional activity of the NOVX proteins of SEQ ID NO:2n, wherein n is an integer between 1 and 141.

[0142] Determining Homology Between Two or More Sequences

[0143] To determine the percent homology of two amino acid sequences or of two nucleic acids, the sequences are aligned for optimal comparison purposes (e.g., gaps can be introduced in the sequence of a first amino acid or nucleic acid sequence for optimal alignment with a second amino or nucleic acid sequence). The amino acid residues or nucleotides at corresponding amino acid positions or nucleotide positions are then compared. When a position in the first sequence is occupied by the same amino acid residue or nucleotide as the corresponding position in the second sequence, then the molecules are homologous at that position (i.e., as used herein amino acid or nucleic acid “homology” is equivalent to amino acid or nucleic acid “identity”).

[0144] The nucleic acid sequence homology may be determined as the degree of identity between two sequences. The homology may be determined using computer programs known in the art, such as GAP software provided in the GCG program package. See, Needleman and Wunsch, 1970. J Mol Biol 48: 443-453. Using GCG GAP software with the following settings for nucleic acid sequence comparison: GAP creation penalty of 5.0 and GAP extension penalty of 0.3, the coding region of the analogous nucleic acid sequences referred to above exhibits a degree of identity preferably of at least 70%, 75%, 80%, 85%, 90%, 95%, 98%, or 99%, with the CDS (encoding) part of the DNA sequence of SEQ ID NO:2n−1, wherein n is an integer between 1 and 141.

[0145] The term “sequence identity” refers to the degree to which two polynucleotide or polypeptide sequences are identical on a residue-by-residue basis over a particular region of comparison. The term “percentage of sequence identity” is calculated by comparing two optimally aligned sequences over that region of comparison, determining the number of positions at which the identical nucleic acid base (e.g., A, T, C, G, U, or I, in the case of nucleic acids) occurs in both sequences to yield the number of matched positions, dividing the number of matched positions by the total number of positions in the region of comparison (i.e., the window size), and multiplying the result by 100 to yield the percentage of sequence identity. The term “substantial identity” as used herein denotes a characteristic of a polynucleotide sequence, wherein the polynucleotide comprises a sequence that has at least 80 percent sequence identity, preferably at least 85 percent identity and often 90 to 95 percent sequence identity, more usually at least 99 percent sequence identity as compared to a reference sequence over a comparison region.

[0146] Chimeric and Fusion Proteins

[0147] The invention also provides NOVX chimeric or fusion proteins. As used herein, a NOVX “chimeric protein” or “fusion protein” comprises a NOVX polypeptide operatively-linked to a non-NOVX polypeptide. An “NOVX polypeptide” refers to a polypeptide having an amino acid sequence corresponding to a NOVX protein of SEQ ID NO:2n, wherein n is an integer between 1 and 141, whereas a “non-NOVX polypeptide” refers to a polypeptide having an amino acid sequence corresponding to a protein that is not substantially homologous to the NOVX protein, e.g., a protein that is different from the NOVX protein and that is derived from the same or a different organism. Within a NOVX fusion protein the NOVX polypeptide can correspond to all or a portion of a NOVX protein. In one embodiment, a NOVX fusion protein comprises at least one biologically-active portion of a NOVX protein. In another embodiment, a NOVX fusion protein comprises at least two biologically-active portions of a NOVX protein. In yet another embodiment, a NOVX fusion protein comprises at least three biologically-active portions of a NOVX protein. Within the fusion protein, the term “operatively-linked” is intended to indicate that the NOVX polypeptide and the non-NOVX polypeptide are fused in-frame with one another. The non-NOVX polypeptide can be fused to the N-terminus or C-terminus of the NOVX polypeptide.

[0148] In one embodiment, the fusion protein is a GST-NOVX fusion protein in which the NOVX sequences are fused to the C-terminus of the GST (glutathione S-transferase) sequences. Such fusion proteins can facilitate the purification of recombinant NOVX polypeptides.

[0149] In another embodiment, the fusion protein is a NOVX protein containing a heterologous signal sequence at its N-terminus. In certain host cells (e.g., mammalian host cells), expression and/or secretion of NOVX can be increased through use of a heterologous signal sequence.

[0150] In yet another embodiment, the fusion protein is a NOVX-immunoglobulin fusion protein in which the NOVX sequences are fused to sequences derived from a member of the immunoglobulin protein family. The NOVX-immunoglobulin fusion proteins of the invention can be incorporated into pharmaceutical compositions and administered to a subject to inhibit an interaction between a NOVX ligand and a NOVX protein on the surface of a cell, to thereby suppress NOVX-mediated signal transduction in vivo. The NOVX-immunoglobulin fusion proteins can be used to affect the bioavailability of a NOVX cognate ligand. Inhibition of the NOVX ligand/NOVX interaction may be useful therapeutically for both the treatment of proliferative and differentiative disorders, as well as modulating (e.g. promoting or inhibiting) cell survival. Moreover, the NOVX-immunoglobulin fusion proteins of the invention can be used as immunogens to produce anti-NOVX antibodies in a subject, to purify NOVX ligands, and in screening assays to identify molecules that inhibit the interaction of NOVX with a NOVX ligand.

[0151] A NOVX chimeric or fusion protein of the invention can be produced by standard recombinant DNA techniques. For example, DNA fragments coding for the different polypeptide sequences are ligated together in-frame in accordance with conventional techniques, e.g., by employing blunt-ended or stagger-ended termini for ligation, restriction enzyme digestion to provide for appropriate termini, filling-in of cohesive ends as appropriate, alkaline phosphatase treatment to avoid undesirable joining, and enzymatic ligation. In another embodiment, the fusion gene can be synthesized by conventional techniques including automated DNA synthesizers. Alternatively, PCR amplification of gene fragments can be carried out using anchor primers that give rise to complementary overhangs between two consecutive gene fragments that can subsequently be annealed and reamplified to generate a chimeric gene sequence (see, e.g., Ausubel, et al. (eds.) CURRENT PROTOCOLS IN MOLECULAR BIOLOGY, John Wiley & Sons, 1992). Moreover, many expression vectors are commercially available that already encode a fusion moiety (e.g., a GST polypeptide). A NOVX-encoding nucleic acid can be cloned into such an expression vector such that the fusion moiety is linked in-frame to the NOVX protein.

[0152] NOVX Agonists and Antagonists

[0153] The invention also pertains to variants of the NOVX proteins that function as either NOVX agonists (i.e., mimetics) or as NOVX antagonists. Variants of the NOVX protein can be generated by mutagenesis (e.g., discrete point mutation or truncation of the NOVX protein). An agonist of the NOVX protein can retain substantially the same, or a subset of, the biological activities of the naturally occurring form of the NOVX protein. An antagonist of the NOVX protein can inhibit one or more of the activities of the naturally occurring form of the NOVX protein by, for example, competitively binding to a downstream or upstream member of a cellular signaling cascade which includes the NOVX protein. Thus, specific biological effects can be elicited by treatment with a variant of limited function. In one embodiment, treatment of a subject with a variant having a subset of the biological activities of the naturally occurring form of the protein has fewer side effects in a subject relative to treatment with the naturally occurring form of the NOVX proteins.

[0154] Variants of the NOVX proteins that function as either NOVX agonists (i.e., mimetics) or as NOVX antagonists can be identified by screening combinatorial libraries of mutants (e.g., truncation mutants) of the NOVX proteins for NOVX protein agonist or antagonist activity. In one embodiment, a variegated library of NOVX variants is generated by combinatorial mutagenesis at the nucleic acid level and is encoded by a variegated gene library. A variegated library of NOVX variants can be produced by, for example, enzymatically ligating a mixture of synthetic oligonucleotides into gene sequences such that a degenerate set of potential NOVX sequences is expressible as individual polypeptides, or alternatively, as a set of larger fusion proteins (e.g., for phage display) containing the set of NOVX sequences therein. There are a variety of methods which can be used to produce libraries of potential NOVX variants from a degenerate oligonucleotide sequence. Chemical synthesis of a degenerate gene sequence can be performed in an automatic DNA synthesizer, and the synthetic gene then ligated into an appropriate expression vector. Use of a degenerate set of genes allows for the provision, in one mixture, of all of the sequences encoding the desired set of potential NOVX sequences. Methods for synthesizing degenerate oligonucleotides are well-known within the art. See, e.g., Narang, 1983. Tetrahedron 39: 3; Itakura, et al., 1984. Annu. Rev. Biochem. 53: 323; Itakura, et al., 1984. Science 198: 1056; Ike, et al., 1983. Nucl. Acids Res. 11: 477.

[0155] Polypeptide Libraries

[0156] In addition, libraries of fragments of the NOVX protein coding sequences can be used to generate a variegated population of NOVX fragments for screening and subsequent selection of variants of a NOVX protein. In one embodiment, a library of coding sequence fragments can be generated by treating a double stranded PCR fragment of a NOVX coding sequence with a nuclease under conditions wherein nicking occurs only about once per molecule, denaturing the double stranded DNA, renaturing the DNA to form double-stranded DNA that can include sense/antisense pairs from different nicked products, removing single stranded portions from reformed duplexes by treatment with S₁ nuclease, and ligating the resulting fragment library into an expression vector. By this method, expression libraries can be derived which encodes N-terminal and internal fragments of various sizes of the NOVX proteins.

[0157] Various techniques are known in the art for screening gene products of combinatorial libraries made by point mutations or truncation, and for screening cDNA libraries for gene products having a selected property. Such techniques are adaptable for rapid screening of the gene libraries generated by the combinatorial mutagenesis of NOVX proteins. The most widely used techniques, which are amenable to high throughput analysis, for screening large gene libraries typically include cloning the gene library into replicable expression vectors, transforming appropriate cells with the resulting library of vectors, and expressing the combinatorial genes under conditions in which detection of a desired activity facilitates isolation of the vector encoding the gene whose product was detected. Recursive ensemble mutagenesis (REM), a new technique that enhances the frequency of functional mutants in the libraries, can be used in combination with the screening assays to identify NOVX variants. See, e.g., Arkin and Yourvan, 1992. Proc. Natl. Acad. Sci. USA 89: 7811-7815; Delgrave, et al., 1993. Protein Engineering 6:327-331.

[0158] NOVX Antibodies

[0159] The term “antibody” as used herein refers to immunoglobulin molecules and immunologically active portions of immunoglobulin (Ig) molecules, i.e., molecules that contain an antigen binding site that specifically binds (immunoreacts with) an antigen. Such antibodies include, but are not limited to, polyclonal, monoclonal, chimeric, single chain, F_{ab}, F_{ab′} and F_{(ab′)2} fragments, and an F_{ab} expression library. In general, antibody molecules obtained from humans relates to any of the classes IgG, IgM, IgA, IgE and IgD, which differ from one another by the nature of the heavy chain present in the molecule. Certain classes have subclasses as well, such as IgG₁, IgG₂, and others. Furthermore, in humans, the light chain may be a kappa chain or a lambda chain. Reference herein to antibodies includes a reference to all such classes, subclasses and types of human antibody species.

[0160] An isolated protein of the invention intended to serve as an antigen, or a portion or fragment thereof, can be used as an immunogen to generate antibodies that immunospecifically bind the antigen, using standard techniques for polyclonal and monoclonal antibody preparation. The full-length protein can be used or, alternatively, the invention provides antigenic peptide fragments of the antigen for use as immunogens. An antigenic peptide fragment comprises at least 6 amino acid residues of the amino acid sequence of the full length protein, such as an amino acid sequence of SEQ ID NO:2n, wherein n is an integer between 1 and 141, and encompasses an epitope thereof such that an antibody raised against the peptide forms a specific immune complex with the full length protein or with any fragment that contains the epitope. Preferably, the antigenic peptide comprises at least 10 amino acid residues, or at least 15 amino acid residues, or at least 20 amino acid residues, or at least 30 amino acid residues. Preferred epitopes encompassed by the antigenic peptide are regions of the protein that are located on its surface; commonly these are hydrophilic regions.

[0161] In certain embodiments of the invention, at least one epitope encompassed by the antigenic peptide is a region of NOVX that is located on the surface of the protein, e.g., a hydrophilic region. A hydrophobicity analysis of the human NOVX protein sequence will indicate which regions of a NOVX polypeptide are particularly hydrophilic and, therefore, are likely to encode surface residues useful for targeting antibody production. As a means for targeting antibody production, hydropathy plots showing regions of hydrophilicity and hydrophobicity may be generated by any method well known in the art, including, for example, the Kyte Doolittle or the Hopp Woods methods, either with or without Fourier transformation. See, e.g., Hopp and Woods, 1981, Proc. Nat. Acad. Sci. USA 78: 3824-3828; Kyte and Doolittle 1982, J. Mol. Biol. 157: 105-142, each incorporated herein by reference in their entirety. Antibodies that are specific for one or more domains within an antigenic protein, or derivatives, fragments, analogs or homologs thereof, are also provided herein.

[0162] The term “epitope” includes any protein determinant capable of specific binding to an immunoglobulin or T-cell receptor. Epitopic determinants usually consist of chemically active surface groupings of molecules such as amino acids or sugar side chains and usually have specific three dimensional structural characteristics, as well as specific charge characteristics. A NOVX polypeptide or a fragment thereof comprises at least one antigenic epitope. An anti-NOVX antibody of the present invention is said to specifically bind to antigen NOVX when the equilibrium binding constant (K_{D}) is ≦1 μM, preferably ≦100 nM, more preferably ≦10 nM, and most preferably ≦100 pM to about 1 pM, as measured by assays such as radioligand binding assays or similar assays known to those skilled in the art.

[0163] A protein of the invention, or a derivative, fragment, analog, homolog or ortholog thereof, may be utilized as an immunogen in the generation of antibodies that immunospecifically bind these protein components.

[0164] Various procedures known within the art may be used for the production of polyclonal or monoclonal antibodies directed against a protein of the invention, or against derivatives, fragments, analogs homologs or orthologs thereof (see, for example, Antibodies: A Laboratory Manual, Harlow E, and Lane D, 1988, Cold Spring Harbor Laboratory Press, Cold Spring Harbor, N.Y., incorporated herein by reference). Some of these antibodies are discussed below.

[0165] Polyclonal Antibodies

[0166] For the production of polyclonal antibodies, various suitable host animals (e.g., rabbit, goat, mouse or other mammal) may be immunized by one or more injections with the native protein, a synthetic variant thereof, or a derivative of the foregoing. An appropriate immunogenic preparation can contain, for example, the naturally occurring immunogenic protein, a chemically synthesized polypeptide representing the immunogenic protein, or a recombinantly expressed immunogenic protein. Furthermore, the protein may be conjugated to a second protein known to be immunogenic in the mammal being immunized. Examples of such immunogenic proteins include but are not limited to keyhole limpet hemocyanin, serum albumin, bovine thyroglobulin, and soybean trypsin inhibitor. The preparation can further include an adjuvant. Various adjuvants used to increase the immunological response include, but are not limited to, Freund's (complete and incomplete), mineral gels (e.g., aluminum hydroxide), surface active substances (e.g., lysolecithin, pluronic polyols, polyanions, peptides, oil emulsions, dinitrophenol, etc.), adjuvants usable in humans such as Bacille Calmette-Guerin and Corynebacterium parvum, or similar immunostimulatory agents. Additional examples of adjuvants which can be employed include MPL-TDM adjuvant (monophosphoryl Lipid A, synthetic trehalose dicorynomycolate).

[0167] The polyclonal antibody molecules directed against the immunogenic protein can be isolated from the mammal (e.g., from the blood) and further purified by well known techniques, such as affinity chromatography using protein A or protein G, which provide primarily the IgG fraction of immune serum. Subsequently, or alternatively, the specific antigen which is the target of the immunoglobulin sought, or an epitope thereof, may be immobilized on a column to purify the immune specific antibody by immunoaffinity chromatography. Purification of immunoglobulins is discussed, for example, by D. Wilkinson (The Scientist, published by The Scientist, Inc., Philadelphia Pa., Vol. 14, No. 8 (Apr. 17, 2000), pp. 25-28).

[0168] Monoclonal Antibodies

[0169] The term “monoclonal antibody” (MAb) or “monoclonal antibody composition”, as used herein, refers to a population of antibody molecules that contain only one molecular species of antibody molecule consisting of a unique light chain gene product and a unique heavy chain gene product. In particular, the complementarity determining regions (CDRs) of the monoclonal antibody are identical in all the molecules of the population. MAbs thus contain an antigen binding site capable of immunoreacting with a particular epitope of the antigen characterized by a unique binding affinity for it.

[0170] Monoclonal antibodies can be prepared using hybridoma methods, such as those described by Kohler and Milstein, Nature, 256:495 (1975). In a hybridoma method, a mouse, hamster, or other appropriate host animal, is typically immunized with an immunizing agent to elicit lymphocytes that produce or are capable of producing antibodies that will specifically bind to the immunizing agent. Alternatively, the lymphocytes can be immunized in vitro.

[0171] The immunizing agent will typically include the protein antigen, a fragment thereof or a fusion protein thereof. Generally, either peripheral blood lymphocytes are used if cells of human origin are desired, or spleen cells or lymph node cells are used if non-human mammalian sources are desired. The lymphocytes are then fused with an immortalized cell line using a suitable fusing agent, such as polyethylene glycol, to form a hybridoma cell (Goding, Monoclonal Antibodies: Principles and Practice, Academic Press, (1986) pp. 59-103). Immortalized cell lines are usually transformed mammalian cells, particularly myeloma cells of rodent, bovine and human origin. Usually, rat or mouse myeloma cell lines are employed. The hybridoma cells can be cultured in a suitable culture medium that preferably contains one or more substances that inhibit the growth or survival of the unfused, immortalized cells. For example, if the parental cells lack the enzyme hypoxanthine guanine phosphoribosyl transferase (HGPRT or HPRT), the culture medium for the hybridomas typically will include hypoxanthine, aminopterin, and thymidine (“HAT medium”), which substances prevent the growth of HGPRT-deficient cells.

[0172] Preferred immortalized cell lines are those that fuse efficiently, support stable high level expression of antibody by the selected antibody-producing cells, and are sensitive to a medium such as HAT medium. More preferred immortalized cell lines are murine myeloma lines, which can be obtained, for instance, from the Salk Institute Cell Distribution Center, San Diego, Calif. and the American Type Culture Collection, Manassas, Va. Human myeloma and mouse-human heteromyeloma cell lines also have been described for the production of human monoclonal antibodies (Kozbor, J. Immunol., 133:3001 (1984); Brodeur et al., Monoclonal Antibody Production Techniques and Applications, Marcel Dekker, Inc., New York, (1987) pp.51-63).

[0173] The culture medium in which the hybridoma cells are cultured can then be assayed for the presence of monoclonal antibodies directed against the antigen. Preferably, the binding specificity of monoclonal antibodies produced by the hybridoma cells is determined by immunoprecipitation or by an in vitro binding assay, such as radioimmunoassay (RIA) or enzyme-linked immunoabsorbent assay (ELISA). Such techniques and assays are known in the art. The binding affinity of the monoclonal antibody can, for example, be determined by the Scatchard analysis of Munson and Pollard, Anal. Biochem., 107:220 (1980). It is an objective, especially important in therapeutic applications of monoclonal antibodies, to identify antibodies having a high degree of specificity and a high binding affinity for the target antigen.

[0174] After the desired hybridoma cells are identified, the clones can be subcloned by limiting dilution procedures and grown by standard methods (Goding, 1986). Suitable culture media for this purpose include, for example, Dulbecco's Modified Eagle's Medium and RPMI-1640 medium. Alternatively, the hybridoma cells can be grown in vivo as ascites in a mammal.

[0175] The monoclonal antibodies secreted by the subclones can be isolated or purified from the culture medium or ascites fluid by conventional immunoglobulin purification procedures such as, for example, protein A-Sepharose, hydroxylapatite chromatography, gel electrophoresis, dialysis, or affinity chromatography.

[0176] The monoclonal antibodies can also be made by recombinant DNA methods, such as those described in U.S. Pat. No. 4,816,567. DNA encoding the monoclonal antibodies of the invention can be readily isolated and sequenced using conventional procedures (e.g., by using oligonucleotide probes that are capable of binding specifically to genes encoding the heavy and light chains of murine antibodies). The hybridoma cells of the invention serve as a preferred source of such DNA. Once isolated, the DNA can be placed into expression vectors, which are then transfected into host cells such as simian COS cells, Chinese hamster ovary (CHO) cells, or myeloma cells that do not otherwise produce immunoglobulin protein, to obtain the synthesis of monoclonal antibodies in the recombinant host cells. The DNA also can be modified, for example, by substituting the coding sequence for human heavy and light chain constant domains in place of the homologous murine sequences (U.S. Pat. No. 4,816,567; Morrison, Nature 368, 812-13 (1994)) or by covalently joining to the immunoglobulin coding sequence all or part of the coding sequence for a non-immunoglobulin polypeptide. Such a non-immunoglobulin polypeptide can be substituted for the constant domains of an antibody of the invention, or can be substituted for the variable domains of one antigen-combining site of an antibody of the invention to create a chimeric bivalent antibody.

[0177] Humanized Antibodies

[0178] The antibodies directed against the protein antigens of the invention can further comprise humanized antibodies or human antibodies. These antibodies are suitable for administration to humans without engendering an immune response by the human against the administered immunoglobulin. Humanized forms of antibodies are chimeric immunoglobulins, immunoglobulin chains or fragments thereof (such as Fv, Fab, Fab′, F(ab′)₂ or other antigen-binding subsequences of antibodies) that are principally comprised of the sequence of a human immunoglobulin, and contain minimal sequence derived from a non-human immunoglobulin. Humanization can be performed following the method of Winter and co-workers (Jones et al., Nature, 321:522-525 (1986); Riechmann et al., Nature, 332:323-327 (1988); Verhoeyen et al., Science, 239:1534-1536 (1988)), by substituting rodent CDRs or CDR sequences for the corresponding sequences of a human antibody. (See also U.S. Pat. No. 5,225,539.) In some instances, Fv framework residues of the human immunoglobulin are replaced by corresponding non-human residues. Humanized antibodies can also comprise residues which are found neither in the recipient antibody nor in the imported CDR or framework sequences. In general, the humanized antibody will comprise substantially all of at least one, and typically two, variable domains, in which all or substantially all of the CDR regions correspond to those of a non-human immunoglobulin and all or substantially all of the framework regions are those of a human immunoglobulin consensus sequence. The humanized antibody optimally also will comprise at least a portion of an immunoglobulin constant region (Fe), typically that of a human immunoglobulin (Jones et al., 1986; Riechmann et al., 1988; and Presta, Curr. Op. Struct. Biol., 2:593-596 (1992)).

[0179] Human Antibodies

[0180] Fully human antibodies essentially relate to antibody molecules in which the entire sequence of both the light chain and the heavy chain, including the CDRs, arise from human genes. Such antibodies are termed “human antibodies”, or “fully human antibodies” herein. Human monoclonal antibodies can be prepared by the trioma technique; the human B-cell hybridoma technique (see Kozbor, et al., 1983 Immunol Today 4: 72) and the EBV hybridoma technique to produce human monoclonal antibodies (see Cole, et al., 1985 In: MONOCLONAL ANTIBODIES AND CANCER THERAPY, Alan R. Liss, Inc., pp. 77-96). Human monoclonal antibodies may be utilized in the practice of the present invention and may be produced by using human hybridomas (see Cote, et al., 1983. Proc Natl Acad Sci USA 80: 2026-2030) or by transforming human B-cells with Epstein Barr Virus in vitro (see Cole, et al., 1985 In: MONOCLONAL ANTIBODIES AND CANCER THERAPY, Alan R. Liss, Inc., pp. 77-96).

[0181] In addition, human antibodies can also be produced using additional techniques, including phage display libraries (Hodgenboom and Winter, J. Mol. Biol., 227:381 (1991); Marks et al., J. Mol. Biol., 222:581 (1991)). Similarly, human antibodies can be made by introducing human immunoglobulin loci into transgenic animals, e.g., mice in which the endogenous immunoglobulin genes have been partially or completely inactivated. Upon challenge, human antibody production is observed, which closely resembles that seen in humans in all respects, including gene rearrangement, assembly, and antibody repertoire. This approach is described, for example, in U.S. Pat. Nos. 5,545,807; 5,545,806; 5,569,825; 5,625,126; 5,633,425; 5,661,016, and in Marks et al. (Bio/Technology 10, 779-783 (1992)); Lonberg et al. (Nature 368 856-859 (1994)); Morrison (Nature 368 812-13 (1994)); Fishwild et al,(Nature Biotechnology 14, 845-51 (1996)); Neuberger (Nature Biotechnology 14, 826 (1996)); and Lonberg and Huszar (Intern. Rev. Immunol. 13 65-93 (1995)).

[0182] Human antibodies may additionally be produced using transgenic nonhuman animals which are modified so as to produce fully human antibodies rather than the animal's endogenous antibodies in response to challenge by an antigen. (See PCT publication WO94/02602). The endogenous genes encoding the heavy and light immunoglobulin chains in the nonhuman host have been incapacitated, and active loci encoding human heavy and light chain immunoglobulins are inserted into the host's genome. The human genes are incorporated, for example, using yeast artificial chromosomes containing the requisite human DNA segments. An animal which provides all the desired modifications is then obtained as progeny by crossbreeding intermediate transgenic animals containing fewer than the full complement of the modifications. The preferred embodiment of such a nonhuman animal is a mouse, and is termed the Xenomouse™ as disclosed in PCT publications WO 96/33735 and WO 96/34096. This animal produces B cells which secrete fully human immunoglobulins. The antibodies can be obtained directly from the animal after immunization with an immunogen of interest, as, for example, a preparation of a polyclonal antibody, or alternatively from immortalized B cells derived from the animal, such as hybridomas producing monoclonal antibodies. Additionally, the genes encoding the immunoglobulins with human variable regions can be recovered and expressed to obtain the antibodies directly, or can be further modified to obtain analogs of antibodies such as, for example, single chain Fv molecules.

[0183] An example of a method of producing a nonhuman host, exemplified as a mouse, lacking expression of an endogenous immunoglobulin heavy chain is disclosed in U.S. Pat. No. 5,939,598. It can be obtained by a method including deleting the J segment genes from at least one endogenous heavy chain locus in an embryonic stem cell to prevent rearrangement of the locus and to prevent formation of a transcript of a rearranged immunoglobulin heavy chain locus, the deletion being effected by a targeting vector containing a gene encoding a selectable marker; and producing from the embryonic stem cell a transgenic mouse whose somatic and germ cells contain the gene encoding the selectable marker.

[0184] A method for producing an antibody of interest, such as a human antibody, is disclosed in U.S. Pat. No. 5,916,771. It includes introducing an expression vector that contains a nucleotide sequence encoding a heavy chain into one mammalian host cell in culture, introducing an expression vector containing a nucleotide sequence encoding a light chain into another mammalian host cell, and fusing the two cells to form a hybrid cell. The hybrid cell expresses an antibody containing the heavy chain and the light chain.

[0185] In a further improvement on this procedure, a method for identifying a clinically relevant epitope on an immunogen, and a correlative method for selecting an antibody that binds immunospecifically to the relevant epitope with high affinity, are disclosed in PCT publication WO 99/53049.

[0186] F_{ab} Fragments and Single Chain Antibodies

[0187] According to the invention, techniques can be adapted for the production of single-chain antibodies specific to an antigenic protein of the invention (see e.g., U.S. Pat. No. 4,946,778). In addition, methods can be adapted for the construction of F_{ab} expression libraries (see e.g., Huse, et al., 1989 Science 246: 1275-1281) to allow rapid and effective identification of monoclonal F_{ab} fragments with the desired specificity for a protein or derivatives, fragments, analogs or homologs thereof. Antibody fragments that contain the idiotypes to a protein antigen may be produced by techniques known in the art including, but not limited to: (i) an F_{(ab′)2} fragment produced by pepsin digestion of an antibody molecule; (ii) an F_{ab} fragment generated by reducing the disulfide bridges of an F_{(ab′)2} fragment; (iii) an F_{ab} fragment generated by the treatment of the antibody molecule with papain and a reducing agent and (iv) Fᵥ fragments.

[0188] Bispecific Antibodies

[0189] Bispecific antibodies are monoclonal, preferably human or humanized, antibodies that have binding specificities for at least two different antigens. In the present case, one of the binding specificities is for an antigenic protein of the invention. The second binding target is any other antigen, and advantageously is a cell-surface protein or receptor or receptor subunit.

[0190] Methods for making bispecific antibodies are known in the art. Traditionally, the recombinant production of bispecific antibodies is based on the co-expression of two immunoglobulin heavy-chain/light-chain pairs, where the two heavy chains have different specificities (Milstein and Cuello, Nature, 305:537-539 (1983)). Because of the random assortment of immunoglobulin heavy and light chains, these hybridomas (quadromas) produce a potential mixture of ten different antibody molecules, of which only one has the correct bispecific structure. The purification of the correct molecule is usually accomplished by affinity chromatography steps. Similar procedures are disclosed in WO 93/08829, published 13 May 1993, and in Traunecker et al., EMBO J., 10:3655-3659 (1991).

[0191] Antibody variable domains with the desired binding specificities (antibody-antigen combining sites) can be fused to immunoglobulin constant domain sequences. The fusion preferably is with an immunoglobulin heavy-chain constant domain, comprising at least part of the hinge, CH2, and CH3 regions. It is preferred to have the first heavy-chain constant region (CH1) containing the site necessary for light-chain binding present in at least one of the fusions. DNAs encoding the immunoglobulin heavy-chain fusions and, if desired, the immunoglobulin light chain, are inserted into separate expression vectors, and are co-transfected into a suitable host organism. For further details of generating bispecific antibodies see, for example, Suresh et al., Methods in Enzymology, 121:210 (1986).

[0192] According to another approach described in WO 96/27011, the interface between a pair of antibody molecules can be engineered to maximize the percentage of heterodimers which are recovered from recombinant cell culture. The preferred interface comprises at least a part of the CH3 region of an antibody constant domain. In this method, one or more small amino acid side chains from the interface of the first antibody molecule are replaced with larger side chains (e.g. tyrosine or tryptophan). Compensatory “cavities” of identical or similar size to the large side chain(s) are created on the interface of the second antibody molecule by replacing large amino acid side chains with smaller ones (e.g. alanine or threonine). This provides a mechanism for increasing the yield of the heterodimer over other unwanted end-products such as homodimers.

[0193] Bispecific antibodies can be prepared as full length antibodies or antibody fragments (e.g. F(ab′)₂ bispecific antibodies). Techniques for generating bispecific antibodies from antibody fragments have been described in the literature. For example, bispecific antibodies can be prepared using chemical linkage. Brennan et al., Science 229:81 (1985) describe a procedure wherein intact antibodies are proteolytically cleaved to generate F(ab′)₂ fragments. These fragments are reduced in the presence of the dithiol complexing agent sodium arsenite to stabilize vicinal dithiols and prevent intermolecular disulfide formation. The Fab′ fragments generated are then converted to thionitrobenzoate (TNB) derivatives. One of the Fab′-TNB derivatives is then reconverted to the Fab′-thiol by reduction with mercaptoethylamine and is mixed with an equimolar amount of the other Fab′-TNB derivative to form the bispecific antibody. The bispecific antibodies produced can be used as agents for the selective immobilization of enzymes.

[0194] Additionally, Fab′ fragments can be directly recovered from E. coli and chemically coupled to form bispecific antibodies. Shalaby et al., J. Exp. Med. 175:217-225 (1992) describe the production of a fully humanized bispecific antibody F(ab′)₂ molecule. Each Fab′ fragment was separately secreted from E. coli and subjected to directed chemical coupling in vitro to form the bispecific antibody. The bispecific antibody thus formed was able to bind to cells overexpressing the ErbB2 receptor and normal human T cells, as well as trigger the lytic activity of human cytotoxic lymphocytes against human breast tumor targets.

[0195] Various techniques for making and isolating bispecific antibody fragments directly from recombinant cell culture have also been described. For example, bispecific antibodies have been produced using leucine zippers. Kostelny et al., J. Immunol. 148(5):1547-1553 (1992). The leucine zipper peptides from the Fos and Jun proteins were linked to the Fab′ portions of two different antibodies by gene fusion. The antibody homodimers were reduced at the hinge region to form monomers and then re-oxidized to form the antibody heterodimers. This method can also be utilized for the production of antibody homodimers. The “diabody” technology described by Hollinger et al., Proc. Natl. Acad. Sci. USA 90:6444-6448 (1993) has provided an alternative mechanism for making bispecific antibody fragments. The fragments comprise a heavy-chain variable domain (V_{H}) connected to a light-chain variable domain (V_{L}) by a linker which is too short to allow pairing between the two domains on the same chain. Accordingly, the V_{H} and V_{L} domains of one fragment are forced to pair with the complementary V_{L} and V_{H} domains of another fragment, thereby forming two antigen-binding sites. Another strategy for making bispecific antibody fragments by the use of single-chain Fv (sFv) dimers has also been reported. See, Gruber et al., J. Immunol. 152:5368 (1994).

[0196] Antibodies with more than two valencies are contemplated. For example, trispecific antibodies can be prepared. Tutt et al., J. Immunol. 147:60 (1991).

[0197] Exemplary bispecific antibodies can bind to two different epitopes, at least one of which originates in the protein antigen of the invention. Alternatively, an anti-antigenic arm of an immunoglobulin molecule can be combined with an arm which binds to a triggering molecule on a leukocyte such as a T-cell receptor molecule (e.g. CD2, CD3, CD28, or B7), or Fc receptors for IgG (FcγR), such as FcγRI (CD64), FcγRII (CD32) and FcγRIII (CD16) so as to focus cellular defense mechanisms to the cell expressing the particular antigen. Bispecific antibodies can also be used to direct cytotoxic agents to cells which express a particular antigen. These antibodies possess an antigen-binding arm and an arm which binds a cytotoxic agent or a radionuclide chelator, such as EOTUBE, DPTA, DOTA, or TETA. Another bispecific antibody of interest binds the protein antigen described herein and further binds tissue factor (TF).

[0198] Heteroconjugate Antibodies

[0199] Heteroconjugate antibodies are also within the scope of the present invention. Heteroconjugate antibodies are composed of two covalently joined antibodies. Such antibodies have, for example, been proposed to target immune system cells to unwanted cells (U.S. Pat. No. 4,676,980), and for treatment of HIV infection (WO 91/00360; WO 92/200373; EP 03089). It is contemplated that the antibodies can be prepared in vitro using known methods in synthetic protein chemistry, including those involving crosslinking agents. For example, immunotoxins can be constructed using a disulfide exchange reaction or by forming a thioether bond. Examples of suitable reagents for this purpose include iminothiolate and methyl-4-mercaptobutyrimidate and those disclosed, for example, in U.S. Pat. No. 4,676,980.

[0200] Effector Function Engineering

[0201] It can be desirable to modify the antibody of the invention with respect to effector function, so as to enhance, e.g., the effectiveness of the antibody in treating cancer. For example, cysteine residue(s) can be introduced into the Fc region, thereby allowing interchain disulfide bond formation in this region. The homodimeric antibody thus generated can have improved internalization capability and/or increased complement-mediated cell killing and antibody-dependent cellular cytotoxicity (ADCC). See Caron et al., J. Exp Med., 176: 1191-1195 (1992) and Shopes, J. Immunol., 148: 2918-2922 (1992). Homodimeric antibodies with enhanced anti-tumor activity can also be prepared using heterobifunctional cross-linkers as described in Wolff et al. Cancer Research, 53: 2560-2565 (1993). Alternatively, an antibody can be engineered that has dual Fc regions and can thereby have enhanced complement lysis and ADCC capabilities. See Stevenson et al., Anti-Cancer Drug Design, 3: 219-230 (1989).

[0202] Immunoconjugates

[0203] The invention also pertains to immunoconjugates comprising an antibody conjugated to a cytotoxic agent such as a chemotherapeutic agent, toxin (e.g., an enzymatically active toxin of bacterial, fungal, plant, or animal origin, or fragments thereof), or a radioactive isotope (i.e., a radioconjugate).

[0204] Chemotherapeutic agents useful in the generation of such immunoconjugates have been described above. Enzymatically active toxins and fragments thereof that can be used include diphtheria A chain, nonbinding active fragments of diphtheria toxin, exotoxin A chain (from Pseudomonas aeruginosa), ricin A chain, abrin A chain, modeccin A chain, alpha-sarcin, Aleurites fordii proteins, dianthin proteins, Phytolaca americana proteins (PAPI, PAPII, and PAP-S), momordica charantia inhibitor, curcin, crotin, sapaonaria officinalis inhibitor, gelonin, mitogellin, restrictocin, phenomycin, enomycin, and the tricothecenes. A variety of radionuclides are available for the production of radioconjugated antibodies. Examples include ²¹²Bi, ¹³¹I, ¹³¹In, ⁹⁰Y, and ¹⁸⁶Re.

[0205] Conjugates of the antibody and cytotoxic agent are made using a variety of bifunctional protein-coupling agents such as N-succinimidyl-3-(2-pyridylditbiol) propionate (SPDP), iminothiolane (IT), bifunctional derivatives of imidoesters (such as dimethyl adipimidate HCL), active esters (such as disuccinimidyl suberate), aldehydes (such as glutareldehyde), bis-azido compounds (such as bis (p-azidobenzoyl) hexanediamine), bis-diazonium derivatives (such as bis-(p-diazoniumbenzoyl)-ethylenediamine), diisocyanates (such as tolyene 2,6-diisocyanate), and bis-active fluorine compounds (such as 1,5-difluoro-2,4-dinitrobenzene). For example, a ricin immunotoxin can be prepared as described in Vitetta et al., Science 238: 1098 (1987). Carbon-14-labeled 1-isothiocyanatobenzyl-3-methyldiethylene triaminepentaacetic acid (MX-DTPA) is an exemplary chelating agent for conjugation of radionucleotide to the antibody. See WO94/11026.

[0206] In another embodiment, the antibody can be conjugated to a “receptor” (such streptavidin) for utilization in tumor pretargeting wherein the antibody-receptor conjugate is administered to the patient, followed by removal of unbound conjugate from the circulation using a clearing agent and then administration of a “ligand” (e.g., avidin) that is in turn conjugated to a cytotoxic agent.

[0207] Immunoliposomes

[0208] The antibodies disclosed herein can also be formulated as immunoliposomes. Liposomes containing the antibody are prepared by methods known in the art, such as described in Epstein et al., Proc. Natl. Acad. Sci. USA, 82: 3688 (1985); Hwang et al., Proc. Natl Acad. Sci. USA, 77: 4030 (1980); and U.S. Pat. Nos. 4,485,045 and 4,544,545. Liposomes with enhanced circulation time are disclosed in U.S. Pat. No. 5,013,556.

[0209] Particularly useful liposomes can be generated by the reverse-phase evaporation method with a lipid composition comprising phosphatidylcholine, cholesterol, and PEG-derivatized phosphatidylethanolamine (PEG-PE). Liposomes are extruded through filters of defined pore size to yield liposomes with the desired diameter. Fab′ fragments of the antibody of the present invention can be conjugated to the liposomes as described in Martin et al., J. Biol. Chem., 257: 286-288 (1982) via a disulfide-interchange reaction. A chemotherapeutic agent (such as Doxorubicin) is optionally contained within the liposome. See Gabizon et al., J. National Cancer Inst., 81(19): 1484 (1989).

[0210] Diagnostic Applications of Antibodies Directed Against the Proteins of the Invention

[0211] Antibodies directed against a protein of the invention may be used in methods known within the art relating to the localization and/or quantitation of the protein (e.g., for use in measuring levels of the protein within appropriate physiological samples, for use in diagnostic methods, for use in imaging the protein, and the like). In a given embodiment, antibodies against the proteins, or derivatives, fragments, analogs or homologs thereof, that contain the antigen binding domain, are utilized as pharmacologically-active compounds (see below).

[0212] An antibody specific for a protein of the invention can be used to isolate the protein by standard techniques, such as immunoaffinity chromatography or immunoprecipitation. Such an antibody can facilitate the purification of the natural protein antigen from cells and of recombinantly produced antigen expressed in host cells. Moreover, such an antibody can be used to detect the antigenic protein (e.g., in a cellular lysate or cell supernatant) in order to evaluate the abundance and pattern of expression of the antigenic protein. Antibodies directed against the protein can be used diagnostically to monitor protein levels in tissue as part of a clinical testing procedure, e.g., to, for example, determine the efficacy of a given treatment regimen. Detection can be facilitated by coupling (i.e., physically linking) the antibody to a detectable substance. Examples of detectable substances include various enzymes, prosthetic groups, fluorescent materials, luminescent materials, bioluminescent materials, and radioactive materials. Examples of suitable enzymes include horseradish peroxidase, alkaline phosphatase, β-galactosidase, or acetylcholinesterase; examples of suitable prosthetic group complexes include streptavidin/biotin and avidinibiotin; examples of suitable fluorescent materials include umbelliferone, fluorescein, fluorescein isothiocyanate, rhodamine, dichlorotriazinylamine fluorescein, dansyl chloride or phycoerythrin; an example of a luminescent material includes luminol; examples of bioluminescent materials include luciferase, luciferin, and aequorin, and examples of suitable radioactive material include ¹²⁵I, ¹³¹I, ³⁵S or ³H.

[0213] Antibody Therapeutics

[0214] Antibodies of the invention, including polyclonal, monoclonal, humanized and fully human antibodies, may used as therapeutic agents. Such agents will generally be employed to treat or prevent a disease or pathology in a subject. An antibody preparation, preferably one having high specificity and high affinity for its target antigen, is administered to the subject and will generally have an effect due to its binding with the target. Such an effect may be one of two kinds, depending on the specific nature of the interaction between the given antibody molecule and the target antigen in question. In the first instance, administration of the antibody may abrogate or inhibit the binding of the target with an endogenous ligand to which it naturally binds. In this case, the antibody binds to the target and masks a binding site of the naturally occurring ligand, wherein the ligand serves as an effector molecule. Thus the receptor mediates a signal transduction pathway for which ligand is responsible.

[0215] Alternatively, the effect may be one in which the antibody elicits a physiological result by virtue of binding to an effector binding site on the target molecule. In this case the target, a receptor having an endogenous ligand which may be absent or defective in the disease or pathology, binds the antibody as a surrogate effector ligand, initiating a receptor-based signal transduction event by the receptor.

[0216] A therapeutically effective amount of an antibody of the invention relates generally to the amount needed to achieve a therapeutic objective. As noted above, this may be a binding interaction between the antibody and its target antigen that, in certain cases, interferes with the functioning of the target, and in other cases, promotes a physiological response. The amount required to be administered will furthermore depend on the binding affinity of the antibody for its specific antigen, and will also depend on the rate at which an administered antibody is depleted from the free volume other subject to which it is administered. Common ranges for therapeutically effective dosing of an antibody or, antibody fragment of the invention may be, by way of nonlimiting example, from about 0.1 mg/kg body weight to about 50 mg/kg body weight. Common dosing frequencies may range, for example, from twice daily to once a week.

[0217] Pharmaceutical Compositions of Antibodies

[0218] Antibodies specifically binding a protein of the invention, as well as other molecules identified by the screening assays disclosed herein, can be administered for the treatment of various disorders in the form of pharmaceutical compositions. Principles and considerations involved in preparing such compositions, as well as guidance in the choice of components are provided, for example, in Remington: The Science And Practice Of Pharmacy 19th ed. (Alfonso R. Gennaro, et al., editors) Mack Pub. Co., Easton, Pa.: 1995; Drug Absorption Enhancement: Concepts, Possibilities, Limitations, And Trends, Harwood Academic Publishers, Langhorne, Pa., 1994; and Peptide And Protein Drug Delivery (Advances In Parenteral Sciences, Vol. 4), 1991, M. Dekker, New York.

[0219] If the antigenic protein is intracellular and whole antibodies are used as inhibitors, internalizing antibodies are preferred. However, liposomes can also be used to deliver the antibody, or an antibody fragment, into cells. Where antibody fragments are used, the smallest inhibitory fragment that specifically binds to the binding domain of the target protein is preferred. For example, based upon the variable-region sequences of an antibody, peptide molecules can be designed that retain the ability to bind the target protein sequence. Such peptides can be synthesized chemically and/or produced by recombinant DNA technology. See, e.g., Marasco et al., Proc. Natl. Acad. Sci. USA, 90: 7889-7893 (1993). The formulation herein can also contain more than one active compound as necessary for the particular indication being treated, preferably those with complementary activities that do not adversely affect each other. Alternatively, or in addition, the composition can comprise an agent that enhances its function, such as, for example, a cytotoxic agent, cytokine, chemotherapeutic agent, or growth-inhibitory agent. Such molecules are suitably present in combination in amounts that are effective for the purpose intended.

[0220] The active ingredients can also be entrapped in microcapsules prepared, for example, by coacervation techniques or by interfacial polymerization, for example, hydroxymethylcellulose or gelatin-microcapsules and poly-(methylmethacrylate) microcapsules, respectively, in colloidal drug delivery systems (for example, liposomes, albumin microspheres, microemulsions, nano-particles, and nanocapsules) or in macroemulsions.

[0221] The formulations to be used for in vivo administration must be sterile. This is readily accomplished by filtration through sterile filtration membranes.

[0222] Sustained-release preparations can be prepared. Suitable examples of sustained-release preparations include semipermeable matrices of solid hydrophobic polymers containing the antibody, which matrices are in the form of shaped articles, e.g., films, or microcapsules. Examples of sustained-release matrices include polyesters, hydrogels (for example, poly(2-hydroxyethyl-methacrylate), or poly(vinylalcohol)), polylactides (U.S. Pat. No. 3,773,919), copolymers of L-glutamic acid and γ ethyl-L-glutamate, non-degradable ethylene-vinyl acetate, degradable lactic acid-glycolic acid copolymers such as the LUPRON DEPOT™ (injectable microspheres composed of lactic acid-glycolic acid copolymer and leuprolide acetate), and poly-D-(−)-3-hydroxybutyric acid. While polymers such as ethylene-vinyl acetate and lactic acid-glycolic acid enable release of molecules for over 100 days, certain hydrogels release proteins for shorter time periods.

[0223] ELISA Assay

[0224] An agent for detecting an analyte protein is an antibody capable of binding to an analyte protein, preferably an antibody with a detectable label. Antibodies can be polyclonal, or more preferably, monoclonal. An intact antibody, or a fragment thereof (e.g., F_{ab} or F_{(ab)2}) can be used. The term “labeled”, with regard to the probe or antibody, is intended to encompass direct labeling of the probe or antibody by coupling (i.e., physically linking) a detectable substance to the probe or antibody, as well as indirect labeling of the probe or antibody by reactivity with another reagent that is directly labeled. Examples of indirect labeling include detection of a primary antibody using a fluorescently-labeled secondary antibody and end-labeling of a DNA probe with biotin such that it can be detected with fluorescently-labeled streptavidin. The term “biological sample” is intended to include tissues, cells and biological fluids isolated from a subject, as well as tissues, cells and fluids present within a subject. Included within the usage of the term “biological sample”, therefore, is blood and a fraction or component of blood including blood serum, blood plasma, or lymph. That is, the detection method of the invention can be used to detect an analyte mRNA, protein, or genomic DNA in a biological sample in vitro as well as in vivo. For example, in vitro techniques for detection of an analyte mRNA include Northern hybridizations and in situ hybridizations. In vitro techniques for detection of an analyte protein include enzyme linked immunosorbent assays (ELISAs), Western blots, immunoprecipitations, and immunofluorescence. In vitro techniques for detection of an analyte genomic DNA include Southern hybridizations. Procedures for conducting immunoassays are described, for example in “ELISA: Theory and Practice: Methods in Molecular Biology”, Vol. 42, J. R. Crowther (Ed.) Human Press, Totowa, N.J., 1995; “Immunoassay”, E. Diamandis and T. Christopoulus, Academic Press, Inc., San Diego, Calif., 1996; and “Practice and Theory of Enzyme Immunoassays”, P. Tijssen, Elsevier Science Publishers, Amsterdam, 1985. Furthermore, in vivo techniques for detection of an analyte protein include introducing into a subject a labeled anti-an analyte protein antibody. For example, the antibody can be labeled with a radioactive marker whose presence and location in a subject can be detected by standard imaging techniques.

[0225] NOVX Recombinant Expression Vectors and Host Cells

[0226] Another aspect of the invention pertains to vectors, preferably expression vectors, containing a nucleic acid encoding a NOVX protein, or derivatives, fragments, analogs or homologs thereof. As used herein, the term “vector” refers to a nucleic acid molecule capable of transporting another nucleic acid to which it has been linked. One type of vector is a “plasmid”, which refers to a circular double stranded DNA loop into which additional DNA segments can be ligated. Another type of vector is a viral vector, wherein additional DNA segments can be ligated into the viral genome. Certain vectors are capable of autonomous replication in a host cell into which they are introduced (e.g., bacterial vectors having a bacterial origin of replication and episomal mammalian vectors). Other vectors (e.g., non-episomal mammalian vectors) are integrated into the genome of a host cell upon introduction into the host cell, and thereby are replicated along with the host genome. Moreover, certain vectors are capable of directing the expression of genes to which they are operatively-linked. Such vectors are referred to herein as “expression vectors”. In general, useful expression vectors in recombinant DNA techniques are often in the form of plasmids. In the present specification, “plasmid” and “vector” can be used interchangeably as the plasmid is the most commonly used form of vector. However, the invention is intended to include such other forms of expression vectors, such as viral vectors (e.g., replication defective retroviruses, adenoviruses and adeno-associated viruses), which serve equivalent functions.

[0227] The recombinant expression vectors of the invention comprise a nucleic acid of the invention in a form suitable for expression of the nucleic acid in a host cell, which means that the recombinant expression vectors include one or more regulatory sequences, selected on the basis of the host cells to be used for expression, that is operatively-linked to the nucleic acid sequence to be expressed. Within a recombinant expression vector, “operably-linked” is intended to mean that the nucleotide sequence of interest is linked to the regulatory sequence(s) in a manner that allows for expression of the nucleotide sequence (e.g., in an in vitro transcription/translation system or in a host cell when the vector is introduced into the host cell).

[0228] The term “regulatory sequence” is intended to includes promoters, enhancers and other expression control elements (e.g., polyadenylation signals). Such regulatory sequences are described, for example, in Goeddel, GENE EXPRESSION TECHNOLOGY: METHODS IN ENZYMOLOGY 185, Academic Press, San Diego, Calif. (1990). Regulatory sequences include those that direct constitutive expression of a nucleotide sequence in many types of host cell and those that direct expression of the nucleotide sequence only in certain host cells (e.g., tissue-specific regulatory sequences). It will be appreciated by those skilled in the art that the design of the expression vector can depend on such factors as the choice of the host cell to be transformed, the level of expression of protein desired, etc. The expression vectors of the invention can be introduced into host cells to thereby produce proteins or peptides, including fusion proteins or peptides, encoded by nucleic acids as described herein (e.g., NOVX proteins, mutant forms of NOVX proteins, fusion proteins, etc.).

[0229] The recombinant expression vectors of the invention can be designed for expression of NOVX proteins in prokaryotic or eukaryotic cells. For example, NOVX proteins can be expressed in bacterial cells such as Escherichia coli, insect cells (using baculovirus expression vectors) yeast cells or mammalian cells. Suitable host cells are discussed further in Goeddel, GENE EXPRESSION TECHNOLOGY: METHODS IN ENZYMOLOGY 185, Academic Press, San Diego, Calif. (1990). Alternatively, the recombinant expression vector can be transcribed and translated in vitro, for example using T7 promoter regulatory sequences and T7 polymerase.

[0230] Expression of proteins in prokaryotes is most often carried out in Escherichia coli with vectors containing constitutive or inducible promoters directing the expression of either fusion or non-fusion proteins. Fusion vectors add a number of amino acids to a protein encoded therein, usually to the amino terminus of the recombinant protein. Such fusion vectors typically serve three purposes: (i) to increase expression of recombinant protein; (ii) to increase the solubility of the recombinant protein; and (iii) to aid in the purification of the recombinant protein by acting as a ligand in affinity purification. Often, in fusion expression vectors, a proteolytic cleavage site is introduced at the junction of the fusion moiety and the recombinant protein to enable separation of the recombinant protein from the fusion moiety subsequent to purification of the fusion protein. Such enzymes, and their cognate recognition sequences, include Factor Xa, thrombin and enterokinase. Typical fusion expression vectors include pGEX (Pharmacia Biotech Inc; Smith and Johnson, 1988. Gene 67: 31-40), pMAL (New England Biolabs, Beverly, Mass.) and pRIT5 (Pharmacia, Piscataway, N.J.) that fuse glutathione S-transferase (GST), maltose E binding protein, or protein A, respectively, to the target recombinant protein.

[0231] Examples of suitable inducible non-fusion E. coli expression vectors include pTrc (Amrann et al., (1988) Gene 69:301-315) and pET 11d (Studier et al., GENE EXPRESSION TECHNOLOGY: METHODS IN ENZYMOLOGY 185, Academic Press, San Diego, Calif. (1990) 60-89).

[0232] One strategy to maximize recombinant protein expression in E. coli is to express the protein in a host bacteria with an impaired capacity to proteolytically cleave the recombinant protein. See, e.g., Gottesman, GENE EXPRESSION TECHNOLOGY: METHODS IN ENZYMOLOGY 185, Academic Press, San Diego, Calif. (1990) 119-128. Another strategy is to alter the nucleic acid sequence of the nucleic acid to be inserted into an expression vector so that the individual codons for each amino acid are those preferentially utilized in E. coli (see, e.g., Wada, et al., 1992. Nucl. Acids Res. 20: 2111-2118). Such alteration of nucleic acid sequences of the invention can be carried out by standard DNA synthesis techniques.

[0233] In another embodiment, the NOVX expression vector is a yeast expression vector. Examples of vectors for expression in yeast Saccharomyces cerivisae include pYepSec 1 (Baldari, et al., 1987. EMBO J. 6: 229-234), pMFa (Kutjan and Herskowitz, 1982. Cell 30: 933-943), pJRY88 (Schultz et al., 1987. Gene 54: 113-123), pYES2 (Invitrogen Corporation, San Diego, Calif), and picZ (InVitrogen Corp, San Diego, Calif.).

[0234] Alternatively, NOVX can be expressed in insect cells using baculovirus expression vectors. Baculovirus vectors available for expression of proteins in cultured insect cells (e.g., SF9 cells) include the pAc series (Smith, et al., 1983. Mol. Cell. Biol. 3: 2156-2165) and the pVL series (Lucklow and Summers, 1989. Virology 170: 31-39).

[0235] In yet another embodiment, a nucleic acid of the invention is expressed in mammalian cells using a mammalian expression vector. Examples of mammalian expression vectors include pCDM8 (Seed, 1987. Nature 329: 840) and pMT2PC (Kaufman, et al., 1987. EMBO J. 6: 187-195). When used in mammalian cells, the expression vector's control functions are often provided by viral regulatory elements. For example, commonly used promoters are derived from polyoma, adenovirus 2, cytomegalovirus, and simian virus 40. For other suitable expression systems for both prokaryotic and eukaryotic cells see, e.g., Chapters 16 and 17 of Sambrook, et al., MOLECULAR CLONING: A LABORATORY MANUAL. 2nd ed., Cold Spring Harbor Laboratory, Cold Spring Harbor Laboratory Press, Cold Spring Harbor, N.Y., 1989.

[0236] In another embodiment, the recombinant mammalian expression vector is capable of directing expression of the nucleic acid preferentially in a particular cell type (e.g., tissue-specific regulatory elements are used to express the nucleic acid). Tissue-specific regulatory elements are known in the art. Non-limiting examples of suitable tissue-specific promoters include the albumin promoter (liver-specific; Pinkert, et al., 1987. Genes Dev. 1: 268-277), lymphoid-specific promoters (Calame and Eaton, 1988. Adv. Immunol. 43: 235-275), in particular promoters of T cell receptors (Winoto and Baltimore, 1989. EMBO J. 8: 729-733) and immunoglobulins (Baneiji, et al., 1983. Cell 33: 729-740; Queen and Baltimore, 1983. Cell 33: 741-748), neuron-specific promoters (e.g., the neurofilament promoter; Byrne and Ruddle, 1989. Proc. Natl. Acad. Sci. USA 86: 5473-5477), pancreas-specific promoters (Edlund, et al., 1985. Science 230: 912-916), and mammary gland-specific promoters (e.g., milk whey promoter; U.S. Pat. No. 4,873,316 and European Application Publication No. 264,166). Developmentally-regulated promoters are also encompassed, e.g., the murine hox promoters (Kessel and Gruss, 1990. Science 249: 374-379) and the cc-fetoprotein promoter (Campes and Tilghman, 1989. Genes Dev. 3: 537-546).

[0237] The invention further provides a recombinant expression vector comprising a DNA molecule of the invention cloned into the expression vector in an antisense orientation. That is, the DNA molecule is operatively-linked to a regulatory sequence in a manner that allows for expression (by transcription of the DNA molecule) of an RNA molecule that is antisense to NOVX mRNA. Regulatory sequences operatively linked to a nucleic acid cloned in the antisense orientation can be chosen that direct the continuous expression of the antisense RNA molecule in a variety of cell types, for instance viral promoters and/or enhancers, or regulatory sequences can be chosen that direct constitutive, tissue specific or cell type specific expression of antisense RNA. The antisense expression vector can be in the form of a recombinant plasmid, phagemid or attenuated virus in which antisense nucleic acids are produced under the control of a high efficiency regulatory region, the activity of which can be determined by the cell type into which the vector is introduced. For a discussion of the regulation of gene expression using antisense genes see, e.g., Weintraub, et al., “Antisense RNA as a molecular tool for genetic analysis,” Reviews-Trends in Genetics, Vol. 1(1) 1986.

[0238] Another aspect of the invention pertains to host cells into which a recombinant expression vector of the invention has been introduced. The terms “host cell” and “recombinant host cell” are used interchangeably herein. It is understood that such terms refer not only to the particular subject cell but also to the progeny or potential progeny of such a cell. Because certain modifications may occur in succeeding generations due to either mutation or environmental influences, such progeny may not, in fact, be identical to the parent cell, but are still included within the scope of the term as used herein.

[0239] A host cell can be any prokaryotic or eukaryotic cell. For example, NOVX protein can be expressed in bacterial cells such as E. coli, insect cells, yeast or mammalian cells (such as Chinese hamster ovary cells (CHO) or COS cells). Other suitable host cells are known to those skilled in the art.

[0240] Vector DNA can be introduced into prokaryotic or eukaryotic cells via conventional transformation or transfection techniques. As used herein, the terms “transformation” and “transfection” are intended to refer to a variety of art-recognized techniques for introducing foreign nucleic acid (e.g., DNA) into a host cell, including calcium phosphate or calcium chloride co-precipitation, DEAE-dextran-mediated transfection, lipofection, or electroporation. Suitable methods for transforming or transfecting host cells can be found in Sambrook, et al. (MOLECULAR CLONING: A LABORATORY MANUAL. 2nd ed., Cold Spring Harbor Laboratory, Cold Spring Harbor Laboratory Press, Cold Spring Harbor, N.Y., 1989), and other laboratory manuals.

[0241] For stable transfection of mammalian cells, it is known that, depending upon the expression vector and transfection technique used, only a small fraction of cells may integrate the foreign DNA into their genome. In order to identify and select these integrants, a gene that encodes a selectable marker (e.g., resistance to antibiotics) is generally introduced into the host cells along with the gene of interest. Various selectable markers include those that confer resistance to drugs, such as G418, hygromycin and methotrexate. Nucleic acid encoding a selectable marker can be introduced into a host cell on the same vector as that encoding NOVX or can be introduced on a separate vector. Cells stably transfected with the introduced nucleic acid can be identified by drug selection (e.g., cells that have incorporated the selectable marker gene will survive, while the other cells die).

[0242] A host cell of the invention, such as a prokaryotic or eukaryotic host cell in culture, can be used to produce (i.e., express) NOVX protein. Accordingly, the invention further provides methods for producing NOVX protein using the host cells of the invention. In one embodiment, the method comprises culturing the host cell of invention (into which a recombinant expression vector encoding NOVX protein has been introduced) in a suitable medium such that NOVX protein is produced. In another embodiment, the method further comprises isolating NOVX protein from the medium or the host cell.

[0243] Transgenic NOVX Animals

[0244] The host cells of the invention can also be used to produce non-human transgenic animals. For example, in one embodiment, a host cell of the invention is a fertilized oocyte or an embryonic stem cell into which NOVX protein-coding sequences have been introduced. Such host cells can then be used to create non-human transgenic animals in which exogenous NOVX sequences have been introduced into their genome or homologous recombinant animals in which endogenous NOVX sequences have been altered. Such animals are useful for studying the function and/or activity of NOVX protein and for identifying and/or evaluating modulators of NOVX protein activity. As used herein, a “transgenic animal” is a non-human animal, preferably a mammal, more preferably a rodent such as a rat or mouse, in which one or more of the cells of the animal includes a transgene. Other examples of transgenic animals include non-human primates, sheep, dogs, cows, goats, chickens, amphibians, etc. A transgene is exogenous DNA that is integrated into the genome of a cell from which a transgenic animal develops and that. remains in the genome of the mature animal, thereby directing the expression of an encoded gene product in one or more cell types or tissues of the transgenic animal. As used herein, a “homologous recombinant animal” is a non-human animal, preferably a mammal, more preferably a mouse, in which an endogenous NOVX gene has been altered by homologous recombination between the endogenous gene and an exogenous DNA molecule introduced into a cell of the animal, e.g., an embryonic cell of the animal, prior to development of the animal.

[0245] A transgenic animal of the invention can be created by introducing NOVX-encoding nucleic acid into the male pronuclei of a fertilized oocyte (e.g., by microinjection, retroviral infection) and allowing the oocyte to develop in a pseudopregnant female foster animal. The human NOVX cDNA sequences, i.e., any one of SEQ ID NOS:2n−1, wherein n is an integer between 1 and 141, can be introduced as a transgene into the genome of a non-human animal. Alternatively, a non-human homologue of the human NOVX gene, such as a mouse NOVX gene, can be isolated based on hybridization to the human NOVX cDNA (described further supra) and used as a transgene. Intronic sequences and polyadenylation signals can also be included in the transgene to increase the efficiency of expression of the transgene. A tissue-specific regulatory sequence(s) can be operably-linked to the NOVX transgene to direct expression of NOVX protein to particular cells. Methods for generating transgenic animals via embryo manipulation and microinjection, particularly animals such as mice, have become conventional in the art and are described, for example, in U.S. Pat. Nos. 4,736,866; 4,870,009; and 4,873,191; and Hogan, 1986. In: MANIPULATING THE MOUSE EMBRYO, Cold Spring Harbor Laboratory Press, Cold Spring Harbor, N.Y. Similar methods are used for production of other transgenic animals. A transgenic founder animal can be identified based upon the presence of the NOVX transgene in its genome and/or expression of NOVX mRNA in tissues or cells of the animals. A transgenic founder animal can then be used to breed additional animals carrying the transgene. Moreover, transgenic animals carrying a transgene-encoding NOVX protein can further be bred to other transgenic animals carrying other transgenes.

[0246] To create a homologous recombinant animal, a vector is prepared which contains at least a portion of a NOVX gene into which a deletion, addition or substitution has been introduced to thereby alter, e.g., functionally disrupt, the NOVX gene. The NOVX gene can be a human gene (e.g., the cDNA of any one of SEQ ID NOS:2n−1, wherein n is an integer between 1 and 141), but more preferably, is a non-human homologue of a human NOVX gene. For example, a mouse homologue of human NOVX gene of SEQ ID NOS:2n−1, wherein n is an integer between 1 and 141, can be used to construct a homologous recombination vector suitable for altering an endogenous NOVX gene in the mouse genome. In one embodiment, the vector is designed such that, upon homologous recombination, the endogenous NOVX gene is functionally disrupted (i.e., no longer encodes a functional protein; also referred to as a “knock out” vector).

[0247] Alternatively, the vector can be designed such that, upon homologous recombination, the endogenous NOVX gene is mutated or otherwise altered but still encodes functional protein (e.g., the upstream regulatory region can be altered to thereby alter the expression of the endogenous NOVX protein). In the homologous recombination vector, the altered portion of the NOVX gene is flanked at its 5′- and 3′-termini by additional nucleic acid of the NOVX gene to allow for homologous recombination to occur between the exogenous NOVX gene carried by the vector and an endogenous NOVX gene in an embryonic stem cell. The additional flanking NOVX nucleic acid is of sufficient length for successful homologous recombination with the endogenous gene. Typically, several kilobases of flanking DNA (both at the 5′- and 3′-termini) are included in the vector. See, e.g., Thomas, et al., 1987. Cell 51: 503 for a description of homologous recombination vectors. The vector is ten introduced into an embryonic stem cell line (e.g., by electroporation) and cells in which the introduced NOVX gene has homologously-recombined with the endogenous NOVX gene are selected. See, e.g., Li, et al., 1992. Cell 69: 915.

[0248] The selected cells are then injected into a blastocyst of an animal (e.g., a mouse) to form aggregation chimeras. See, e.g., Bradley, 1987. In: TERATOCARCINOMAS AND EMBRYONIC STEM CELLS: A PRACTICAL APPROACH, Robertson, ed. IRL, Oxford, pp. 113-152. A chimeric embryo can then be implanted into a suitable pseudopregnant female foster animal and the embryo brought to term. Progeny harboring the homologously-recombined DNA in their germ cells can be used to breed animals in which all cells of the animal contain the homologously-recombined DNA by germline transmission of the transgene. Methods for constructing homologous recombination vectors and homologous recombinant animals are described further in Bradley, 1991. Curr. Opin. Biotechnol. 2: 823-829; PCT International Publication Nos.: WO 90/11354; WO 91/01140; WO 92/0968; and WO 93/04169.

[0249] In another embodiment, transgenic non-humans animals can be produced that contain selected systems that allow for regulated expression of the transgene. One example of such a system is the cre/loxP recombinase system of bacteriophage P1. For a description of the cre/loxP recombinase system, See, e.g., Lakso, et al., 1992. Proc. Natl. Acad. Sci. USA 89: 6232-6236. Another example of a recombinase system is the FLP recombinase system of Saccharomyces cerevisiae. See, O'Gorman, et al., 1991. Science 251:1351-1355. If a cre/loxP recombinase system is used to regulate expression of the transgene, animals containing transgenes encoding both the Cre recombinase and a selected protein are required. Such animals can be provided through the construction of “double” transgenic animals, e.g., by mating two transgenic animals, one containing a transgene encoding a selected protein and the other containing a transgene encoding a recombinase.

[0250] Clones of the non-human transgenic animals described herein can also be produced according to the methods described in Wilmut, et al., 1997. Nature 385: 810-813. In brief, a cell (e.g., a somatic cell) from the transgenic animal can be isolated and induced to exit the growth cycle and enter G₀ phase. The quiescent cell can then be fused, e.g., through the use of electrical pulses, to an enucleated oocyte from an animal of the same species from which the quiescent cell is isolated. The reconstructed oocyte is then cultured such that it develops to morula or blastocyte and then transferred to pseudopregnant female foster animal. The offspring borne of this female foster animal will be a clone of the animal from which the cell (e.g., the somatic cell) is isolated.

[0251] Pharmaceutical Compositions

[0252] The NOVX nucleic acid molecules, NOVX proteins, and anti-NOVX antibodies (also referred to herein as “active compounds”) of the invention, and derivatives, fragments, analogs and homologs thereof, can be incorporated into pharmaceutical compositions suitable for administration. Such compositions typically comprise the nucleic acid molecule, protein, or antibody and a pharmaceutically acceptable carrier. As used herein, “pharmaceutically acceptable carrier” is intended to include any and all solvents, dispersion media, coatings, antibacterial and antifungal agents, isotonic and absorption delaying agents, and the like, compatible with pharmaceutical administration. Suitable carriers are described in the most recent edition of Remington's Pharmaceutical Sciences, a standard reference text in the field, which is incorporated herein by reference. Preferred examples of such carriers or diluents include, but are not limited to, water, saline, finger's solutions, dextrose solution, and 5% human serum albumin. Liposomes and non-aqueous vehicles such as fixed oils may also be used. The use of such media and agents for pharmaceutically active substances is well known in the art. Except insofar as any conventional media or agent is incompatible with the active compound, use thereof in the compositions is contemplated. Supplementary active compounds can also be incorporated into the compositions.

[0253] A pharmaceutical composition of the invention is formulated to be compatible with its intended route of administration. Examples of routes of administration include parenteral, e.g., intravenous, intradermal, subcutaneous, oral (e.g., inhalation), transdermal (i.e., topical), transmucosal, and rectal administration. Solutions or suspensions used for parenteral, intradermal, or subcutaneous application can include the following components: a sterile diluent such as water for injection, saline solution, fixed oils, polyethylene glycols, glycerine, propylene glycol or other synthetic solvents; antibacterial agents such as benzyl alcohol or methyl parabens; antioxidants such as ascorbic acid or sodium bisulfite; chelating agents such as ethylenediaminetetraacetic acid (EDTA); buffers such as acetates, citrates or phosphates, and agents for the adjustment of tonicity such as sodium chloride or dextrose. The pH can be adjusted with acids or bases, such as hydrochloric acid or sodium hydroxide. The parenteral preparation can be enclosed in ampoules, disposable syringes or multiple dose vials made of glass or plastic.

[0254] Pharmaceutical compositions suitable for injectable use include sterile aqueous solutions (where water soluble) or dispersions and sterile powders for the extemporaneous preparation of sterile injectable solutions or dispersion. For intravenous administration, suitable carriers include physiological saline, bacteriostatic water, Cremophor EL™ (BASF, Parsippany, N.J.) or phosphate buffered saline (PBS). In all cases, the composition must be sterile and should be fluid to the extent that easy syringeability exists. It must be stable under the conditions of manufacture and storage and must be preserved against the contaminating action of microorganisms such as bacteria and fungi. The carrier can be a solvent or dispersion medium containing, for example, water, ethanol, polyol (for example, glycerol, propylene glycol, and liquid polyethylene glycol, and the like), and suitable mixtures thereof. The proper fluidity can be maintained, for example, by the use of a coating such as lecithin, by the maintenance of the required particle size in the case of dispersion and by the use of surfactants. Prevention of the action of microorganisms can be achieved by various antibacterial and antifungal agents, for example, parabens, chlorobutanol, phenol, ascorbic acid, thimerosal, and the like. In many cases, it will be preferable to include isotonic agents, for example, sugars, polyalcohols such as manitol, sorbitol, sodium chloride in the composition. Prolonged absorption of the injectable compositions can be brought about by including in the composition an agent which delays absorption, for example, aluminum monostearate and gelatin.

[0255] Sterile injectable solutions can be prepared by incorporating the active compound (e.g., a NOVX protein or anti-NOVX antibody) in the required amount in an appropriate solvent with one or a combination of ingredients enumerated above, as required, followed by filtered sterilization. Generally, dispersions are prepared by incorporating the active compound into a sterile vehicle that contains a basic dispersion medium and the required other ingredients from those-enumerated above. In the case of sterile powders for the preparation of sterile injectable solutions, methods of preparation are vacuum drying and freeze-drying that yields a powder of the active ingredient plus any additional desired ingredient from a previously sterile-filtered solution thereof.

[0256] Oral compositions generally include an inert diluent or an edible carrier. They can be enclosed in gelatin capsules or compressed into tablets. For the purpose of oral therapeutic administration, the active compound can be incorporated with excipients and used in the form of tablets, troches, or capsules. Oral compositions can also be prepared using a fluid carrier for use as a mouthwash, wherein the compound in the fluid carrier is applied orally and swished and expectorated or swallowed. Pharmaceutically compatible binding agents, and/or adjuvant materials can be included as part of the composition. The tablets, pills, capsules, troches and the like can contain any of the following ingredients, or compounds of a similar nature: a binder such as microcrystalline cellulose, gum tragacanth or gelatin; an excipient such as starch or lactose, a disintegrating agent such as alginic acid, Primogel, or corn starch; a lubricant such as magnesium stearate or Sterotes; a glidant such as colloidal silicon dioxide; a sweetening agent such as sucrose or saccharin; or a flavoring agent such as peppermint, methyl salicylate, or orange flavoring.

[0257] For administration by inhalation, the compounds are delivered in the form of an aerosol spray from pressured container or dispenser which contains a suitable propellant, e.g., a gas such as carbon dioxide, or a nebulizer.

[0258] Systemic administration can also be by transmucosal or transdermal means. For transmucosal or transdermal administration, penetrants appropriate to the barrier to be permeated are used in the formulation. Such penetrants are generally known in the art, and include, for example, for transmucosal administration, detergents, bile salts, and fusidic acid derivatives. Transmucosal administration can be accomplished through the use of nasal sprays or suppositories. For transdermal administration, the active compounds are formulated into ointments, salves, gels, or creams as generally known in the art.

[0259] The compounds can also be prepared in the form of suppositories (e.g., with conventional suppository bases such as cocoa butter and other glycerides) or retention enemas for rectal delivery.

[0260] In one embodiment, the active compounds are prepared with carriers that will protect the compound against rapid elimination from the body, such as a controlled release formulation, including implants and microencapsulated delivery systems. Biodegradable, biocompatible polymers can be used, such as ethylene vinyl acetate, polyanhydrides, polyglycolic acid, collagen, polyorthoesters, and polylactic acid. Methods for preparation of such formulations will be apparent to those skilled in the art. The materials can also be obtained commercially from Alza Corporation and Nova Pharmaceuticals, Inc. Liposomal suspensions (including liposomes targeted to infected cells with monoclonal antibodies to viral antigens) can also be used as pharmaceutically acceptable carriers. These can be prepared according to methods known to those skilled in the art, for example, as described in U.S. Pat. No. 4,522,811.

[0261] It is especially advantageous to formulate oral or parenteral compositions in dosage unit form for ease of administration and uniformity of dosage. Dosage unit form as used herein refers to physically discrete units suited as unitary dosages for the subject to be treated; each unit containing a predetermined quantity of active compound calculated to produce the desired therapeutic effect in association with the required pharmaceutical carrier. The specification for the dosage unit forms of the invention are dictated by and directly dependent on the unique characteristics of the active compound and the particular therapeutic effect to be achieved, and the limitations inherent in the art of compounding such an active compound for the treatment of individuals.

[0262] The nucleic acid molecules of the invention can be inserted into vectors and used as gene therapy vectors. Gene therapy vectors can be delivered to a subject by, for example, intravenous injection, local administration (see, e.g., U.S. Pat. No. 5,328,470) or by stereotactic injection (see, e.g., Chen, et al., 1994. Proc. Natl. Acad. Sci. USA 91: 3054-3057). The pharmaceutical preparation of the gene therapy vector can include the gene therapy vector in an acceptable diluent, or can comprise a slow release matrix in which the gene delivery vehicle is imbedded. Alternatively, where the complete gene delivery vector can be produced intact from recombinant cells, e.g., retroviral vectors, the pharmaceutical preparation can include one or more cells that produce the gene delivery system.

[0263] The pharmaceutical compositions can be included in a container, pack, or dispenser together with instructions for administration.

[0264] Screening and Detection Methods

[0265] The isolated nucleic acid molecules of the invention can be used to express NOVX protein (e.g., via a recombinant expression vector in a host cell in gene therapy applications), to detect NOVX mRNA (e.g., in a biological sample) or a genetic lesion in a NOVX gene, and to modulate NOVX activity, as described further, below. In addition, the NOVX proteins can be used to screen drugs or compounds that modulate the NOVX protein activity or expression as well as to treat disorders characterized by insufficient or excessive production of NOVX protein or production of NOVX protein forms that have decreased or aberrant activity compared to NOVX wild-type protein (e.g.; diabetes (regulates insulin release); obesity (binds and transport lipids); metabolic disturbances associated with obesity, the metabolic syndrome X as well as anorexia and wasting disorders associated with chronic diseases and various cancers, and infectious disease(possesses anti-microbial activity) and the various dyslipidemias. In addition, the anti-NOVX antibodies of the invention can be used to detect and isolate NOVX proteins and modulate NOVX activity. In yet a further aspect, the invention can be used in methods to influence appetite, absorption of nutrients and the disposition of metabolic substrates in both a positive and negative fashion.

[0266] The invention further pertains to novel agents identified by the screening assays described herein and uses thereof for treatments as described, supra.

[0267] Screening Assays

[0268] The invention provides a method (also referred to herein as a “screening assay”) for identifying modulators, i.e., candidate or test compounds or agents (e.g., peptides, peptidomimetics, small molecules or other drugs) that bind to NOVX proteins or have a stimulatory or inhibitory effect on, e.g., NOVX protein expression or NOVX protein activity. The invention also includes compounds identified in the screening assays described herein.

[0269] In one embodiment, the invention provides assays for screening candidate or test compounds which bind to or modulate the activity of the membrane-bound form of a NOVX protein or polypeptide or biologically-active portion thereof. The test compounds of the invention can be obtained using any of the numerous approaches in combinatorial library methods known in the art, including: biological libraries; spatially addressable parallel solid phase or solution phase libraries; synthetic library methods requiring deconvolution; the “one-bead one-compound” library method; and synthetic library methods using affinity chromatography selection. The biological library approach is limited to peptide libraries, while the other four approaches are applicable to peptide, non-peptide oligomer or small molecule libraries of compounds. See, e.g., Lam, 1997. Anticancer Drug Design 12: 145.

[0270] A “small molecule” as used herein, is meant to refer to a composition that has a molecular weight of less than about 5 kD and most preferably less than about 4 kD. Small molecules can be, e.g., nucleic acids, peptides, polypeptides, peptidomimetics, carbohydrates, lipids or other organic or inorganic molecules. Libraries of chemical and/or biological mixtures, such as fungal, bacterial, or algal extracts, are known in the art and can be screened with any of the assays of the invention.

[0271] Examples of methods for the synthesis of molecular libraries can be found in the art, for example in: DeWitt, et al., 1993. Proc. Natl. Acad. Sci. U.S.A. 90: 6909; Erb, et al., 1994. Proc. Natl. Acad. Sci. U.S.A. 91: 11422; Zuckermann, et al., 1994. J. Med. Chem. 37: 2678; Cho, et al., 1993. Science 261: 1303; Carrell, et al., 1994. Angew. Chem. Int. Ed. Engl. 33: 2059; Carell, et al., 1994. Angew. Chem. Int. Ed. Engl. 33: 2061; and Gallop, et al., 1994. J. Med. Chem. 37: 1233.

[0272] Libraries of compounds may be presented in solution (e.g., Houghten, 1992. Biotechniques 13: 412-421), or on beads (Lam, 1991. Nature 354: 82-84), on chips (Fodor, 1993. Nature 364: 555-556), bacteria (Ladner, U.S. Pat. No. 5,223,409), spores (Ladner, U.S. Pat. No. 5,233,409), plasmids (Cull, et al., 1992. Proc. Natl. Acad. Sci. USA 89: 1865-1869) or on phage (Scott and Smith, 1990. Science 249: 386-390; Devlin, 1990. Science 249: 404-406; Cwirla, et al., 1990. Proc. Natl. Acad. Sci. U.S.A. 87: 6378-6382; Felici, 1991. J. Mol. Biol. 222: 301-310; Ladner, U.S. Pat. No. 5,233,409.).

[0273] In one embodiment, an assay is a cell-based assay in which a cell which expresses a membrane-bound form of NOVX protein, or a biologically-active portion thereof, on the cell surface is contacted with a test compound and the ability of the test compound to bind to a NOVX protein determined. The cell, for example, can of mammalian origin or a yeast cell. Determining the ability of the test compound to bind to the NOVX protein can be accomplished, for example, by coupling the test compound with a radioisotope or enzymatic label such that binding of the test compound to the NOVX protein or biologically-active portion thereof can be determined by detecting the labeled compound in a complex. For example, test compounds can be labeled with ¹²⁵I, ³⁵S, ¹⁴C, or ³H, either directly or indirectly, and the radioisotope detected by direct counting of radioemission or by scintillation counting. Alternatively, test compounds can be enzymatically-labeled with, for example, horseradish peroxidase, alkaline phosphatase, or luciferase, and the enzymatic label detected by determination of conversion of an appropriate substrate to product. In one embodiment, the assay comprises contacting a cell which expresses a membrane-bound form of NOVX protein, or a biologically-active portion thereof, on the cell surface with a known compound which binds NOVX to form an assay mixture, contacting the assay mixture with a test compound, and determining the ability of the test compound to interact with a NOVX protein, wherein determining the ability of the test compound to interact with a NOVX protein comprises determining the ability of the test compound to preferentially bind to NOVX protein or a biologically-active portion thereof as compared to the known compound.

[0274] In another embodiment, an assay is a cell-based assay comprising contacting a cell expressing a membrane-bound form of NOVX protein, or a biologically-active portion thereof, on the cell surface with a test compound and determining the ability of the test compound to modulate (e.g., stimulate or inhibit) the activity of the NOVX protein or biologically-active portion thereof. Determining the ability of the test compound to modulate the activity of NOVX or a biologically-active portion thereof can be accomplished, for example, by determining the ability of the NOVX protein to bind to or interact with a NOVX target molecule. As used herein, a “target molecule” is a molecule with which a NOVX protein binds or interacts in nature, for example, a molecule on the surface of a cell which expresses a NOVX interacting protein, a molecule on the surface of a second cell, a molecule in the extracellular milieu, a molecule associated with the internal surface of a cell membrane or a cytoplasmic molecule. a NOVX target molecule can be a non-NOVX molecule or a NOVX protein or polypeptide of the invention. In one embodiment, a NOVX target molecule is a component of a signal transduction pathway that facilitates transduction of an extracellular signal (e.g. a signal generated by binding of a compound to a membrane-bound NOVX molecule) through the cell membrane and into the cell. The target, for example, can be a second intercellular protein that has catalytic activity or a protein that facilitates the association of downstream signaling molecules with NOVX.

[0275] Determining the ability of the NOVX protein to bind to or interact with a NOVX target molecule can be accomplished by one of the methods described above for determining direct binding. In one embodiment, determining the ability of the NOVX protein to bind to or interact with a NOVX target molecule can be accomplished by determining the activity of the target molecule. For example, the activity of the target molecule can be determined by detecting induction of a cellular second messenger of the target (i.e. intracellular Ca²⁺, diacylglycerol, IP₃, etc.), detecting catalytic/enzymatic activity of the target an appropriate substrate, detecting the induction of a reporter gene (comprising a NOVX-responsive regulatory element operatively linked to a nucleic acid encoding a detectable marker, e.g., luciferase), or detecting a cellular response, for example, cell survival, cellular differentiation, or cell proliferation.

[0276] In yet another embodiment, an assay of the invention is a cell-free assay comprising contacting a NOVX protein or biologically-active portion thereof with a test compound and determining the ability of the test compound to bind to the NOVX protein or biologically-active portion thereof. Binding of the test compound to the NOVX protein can be determined either directly or indirectly as described above. In one such embodiment, the assay comprises contacting the NOVX protein or biologically-active portion thereof with a known compound which binds NOVX to form an assay mixture, contacting the assay mixture with a test compound, and determining the ability of the test compound to interact with a NOVX protein, wherein determining the ability of the test compound to interact with a NOVX protein comprises determining the ability of the test compound to preferentially bind to NOVX or biologically-active portion thereof as compared to the known compound.

[0277] In still another embodiment, an assay is a cell-free assay comprising contacting NOVX protein or biologically-active portion thereof with a test compound and determining the ability of the test compound to modulate (e.g. stimulate or inhibit) the activity of the NOVX protein or biologically-active portion thereof. Determining the ability of the test compound to modulate the activity of NOVX can be accomplished, for example, by determining the ability of the NOVX protein to bind to a NOVX target molecule by one of the methods described above for determining direct binding. In an alternative embodiment, determining the ability of the test compound to modulate the activity of NOVX protein can be accomplished by determining the ability of the NOVX protein further modulate a NOVX target molecule. For example, the catalytic/enzymatic activity of the target molecule on an appropriate substrate can be determined as described, supra.

[0278] In yet another embodiment, the cell-free assay comprises contacting the NOVX protein or biologically-active portion thereof with a known compound which binds NOVX protein to form an assay mixture, contacting the assay mixture with a test compound, and determining the ability of the test compound to interact with a NOVX protein, wherein determining the ability of the test compound to interact with a NOVX protein comprises determining the ability of the NOVX protein to preferentially bind to or modulate the activity of a NOVX target molecule.

[0279] The cell-free assays of the invention are amenable to use of both the soluble form or the membrane-bound form of NOVX protein. In the case of cell-free assays comprising the membrane-bound form of NOVX protein, it may be desirable to utilize a solubilizing agent such that the membrane-bound form of NOVX protein is maintained in solution. Examples of such solubilizing agents include non-ionic detergents such as -n-octylglucoside, n-dodecylglucoside, n-dodecylmaltoside, octanoyl-N-methylglucamide, decanoyl-N-methylglucamide, Triton® X-100, Triton® X-114, Thesit®, Isotridecypoly(ethylene glycol ether)ₙ, N-dodecyl--N,N-dimethyl-3-ammonio-1-propane sulfonate, 3-(3-cholamidopropyl) dimethylamminiol-1-propane sulfonate (CHAPS), or 3-(3-cholamidopropyl)dimethylamminiol-2-hydroxy-1-propane sulfonate (CHAPSO).

[0280] In more than one embodiment of the above assay methods of the invention, it may be desirable to immobilize either NOVX protein or its target molecule to facilitate separation of complexed from uncomplexed forms of one or both of the proteins, as well as to accommodate automation of the assay. Binding of a test compound to NOVX protein, or interaction of NOVX protein with a target molecule in the presence and absence of a candidate compound, can be accomplished in any vessel suitable for containing the reactants. Examples of such vessels include microtiter plates, test tubes, and micro-centrifuge tubes. In one embodiment, a fusion protein can be provided that adds a domain that allows one or both of the proteins to be bound to a matrix. For example, GST-NOVX fusion proteins or GST-target fusion proteins can be adsorbed onto glutathione sepharose beads (Sigma Chemical, St. Louis, Mo.) or glutathione derivatized microtiter plates, that are then combined with the test compound or the test compound and either the non-adsorbed target protein or NOVX protein, and the mixture is incubated under conditions conducive to complex formation (e.g., at physiological conditions for salt and pH). Following incubation, the beads or microtiter plate wells are washed to remove any unbound components, the matrix immobilized in the case of beads, complex determined either directly or indirectly, for example, as described, supra. Alternatively, the complexes can be dissociated from the matrix, and the level of NOVX protein binding or activity determined using standard techniques.

[0281] Other techniques for immobilizing proteins on matrices can also be used in the screening assays of the invention. For example, either the NOVX protein or its target molecule can be immobilized utilizing conjugation of biotin and streptavidin. Biotinylated NOVX protein or target molecules can be prepared from biotin-NHS (N-hydroxy-succinimide) using techniques well-known within the art (e.g., biotinylation kit, Pierce Chemicals, Rockford, Ill.), and immobilized in the wells of streptavidin-coated 96 well plates (Pierce Chemical). Alternatively, antibodies reactive with NOVX protein or target molecules, but which do not interfere with binding of the NOVX protein to its target molecule, can be derivatized to the wells of the plate, and unbound target or NOVX protein trapped in the wells by antibody conjugation. Methods for detecting such complexes, in addition to those described above for the GST-immobilized complexes, include immunodetection of complexes using antibodies reactive with the NOVX protein or target molecule, as well as enzyme-linked assays that rely on detecting an enzymatic activity associated with the NOVX protein or target molecule.

[0282] In another embodiment, modulators of NOVX protein expression are identified in a method wherein a cell is contacted with a candidate compound and the expression of NOVX mRNA or protein in the cell is determined. The level of expression of NOVX mRNA or protein in the presence of the candidate compound is compared to the level of expression of NOVX mRNA or protein in the absence of the candidate compound. The candidate compound can then be identified as a modulator of NOVX mRNA or protein expression based upon this comparison. For example, when expression of NOVX mRNA or protein is greater (i.e., statistically significantly greater) in the presence of the candidate compound than in its absence, the candidate compound is identified as a stimulator of NOVX mRNA or protein expression. Alternatively, when expression of NOVX mRNA or protein is less (statistically significantly less) in the presence of the candidate compound than in its absence, the candidate compound is identified as an inhibitor of NOVX mRNA or protein expression. The level of NOVX mRNA or protein expression in the cells can be determined by methods described herein for detecting NOVX mRNA or protein.

[0283] In yet another aspect of the invention, the NOVX proteins can be used as “bait proteins” in a two-hybrid assay or three hybrid assay (see, e.g., U.S. Pat. No. 5,283,317; Zervos, et al., 1993. Cell 72: 223-232; Madura, et al., 1993. J. Biol. Chem. 268: 12046-12054; Bartel, et al., 1993. Biotechniques 14: 920-924; Iwabuchi, et al., 1993. Oncogene 8: 1693-1696; and Brent WO 94/10300), to identify other proteins that bind to or interact with NOVX (“NOVX-binding proteins” or “NOVX-bp”) and modulate NOVX activity. Such NOVX-binding proteins are also likely to be involved in the propagation of signals by the NOVX proteins as, for example, upstream or downstream elements of the NOVX pathway.

[0284] The two-hybrid system is based on the modular nature of most transcription factors, which consist of separable DNA-binding and activation domains. Briefly, the assay utilizes two different DNA constructs. In one construct, the gene that codes for NOVX is fused to a gene encoding the DNA binding domain of a known transcription factor (e.g., GAL-4). In the other construct, a DNA sequence, from a library of DNA sequences, that encodes an unidentified protein (“prey” or “sample”) is fused to a gene that codes for the activation domain of the known transcription factor. If the “bait” and the “prey” proteins are able to interact, in vivo, forming a NOVX-dependent complex, the DNA-binding and activation domains of the transcription factor are brought into close proximity. This proximity allows transcription of a reporter gene (e.g., LacZ) that is operably linked to a transcriptional regulatory site responsive to the transcription factor. Expression of the reporter gene can be detected and cell colonies containing the functional transcription factor can be isolated and used to obtain the cloned gene that encodes the protein which interacts with NOVX.

[0285] The invention further pertains to novel agents identified by the aforementioned screening assays and uses thereof for treatments as described herein.

[0286] Detection Assays

[0287] Portions or fragments of the cDNA sequences identified herein (and the corresponding complete gene sequences) can be used in numerous ways as polynucleotide reagents. By way of example, and not of limitation, these sequences can be used to: (i) map their respective genes on a chromosome; and, thus, locate gene regions associated with genetic disease; (ii) identify an individual from a minute biological sample (tissue typing); and (iii) aid in forensic identification of a biological sample. Some of these applications are described in the subsections, below.

[0288] Chromosome Mapping

[0289] Once the sequence (or a portion of the sequence) of a gene has been isolated, this sequence can be used to map the location of the gene on a chromosome. This process is called chromosome mapping. Accordingly, portions or fragments of a NOVX sequence, i.e., of SEQ ID NOS:2n−1, wherein n is an integer between 1 and 141, or fragments or derivatives thereof, can be used to map the location of the NOVX genes, respectively, on a chromosome. The mapping of the NOVX sequences to chromosomes is an important first step in correlating these sequences with genes associated with disease.

[0290] Briefly, NOVX genes can be mapped to chromosomes by preparing PCR primers (preferably 15-25 bp in length) from the NOVX sequences. Computer analysis of the NOVX, sequences can be used to rapidly select primers that do not span more than one exon in the genomic DNA, thus complicating the amplification process. These primers can then be used for PCR screening of somatic cell hybrids containing individual human chromosomes. Only those hybrids containing the human gene corresponding to the NOVX sequences will yield an amplified fragment.

[0291] Somatic cell hybrids are prepared by fusing somatic cells from different mammals (e.g., human and mouse cells). As hybrids of human and mouse cells grow and divide, they gradually lose human chromosomes in random order, but retain the mouse chromosomes. By using media in which mouse cells cannot grow, because they lack a particular enzyme, but in which human cells can, the one human chromosome that contains the gene encoding the needed enzyme will be retained. By using various media, panels of hybrid cell lines can be established. Each cell line in a panel contains either a single human chromosome or a small number of human chromosomes, and a full set of mouse chromosomes, allowing easy mapping of individual genes to specific human chromosomes. See, e.g., D'Eustachio, et al., 1983. Science 220: 919-924. Somatic cell hybrids containing only fragments of human chromosomes can also be produced by using human chromosomes with translocations and deletions.

[0292] PCR mapping of somatic cell hybrids is a rapid procedure for assigning a particular sequence to a particular chromosome. Three or more sequences can be assigned per day using a single thermal cycler. Using the NOVX sequences to design oligonucleotide primers, sub-localization can be achieved with panels of fragments from specific chromosomes.

[0293] Fluorescence in situ hybridization (FISH) of a DNA sequence to a metaphase chromosomal spread can further be used to provide a precise chromosomal location in one step. Chromosome spreads can be made using cells whose division has been blocked in metaphase by a chemical like colcemid that disrupts the mitotic spindle. The chromosomes can be treated briefly with trypsin, and then stained with Giemsa. A pattern of light and dark bands develops on each chromosome, so that the chromosomes can be identified individually. The FISH technique can be used with a DNA sequence as short as 500 or 600 bases. However, clones larger than 1,000 bases have a higher likelihood of binding to a unique chromosomal location with sufficient signal intensity for simple detection. Preferably 1,000 bases, and more preferably 2,000 bases, will suffice to get good results at a reasonable amount of time. For a review of this technique, see, Verma, et al., HUMAN CHROMOSOMES: A MANUAL OF BASIC TECHNIQUES (Pergamon Press, New York 1988).

[0294] Reagents for chromosome mapping can be used individually to mark a single chromosome or a single site on that chromosome, or panels of reagents can be used for marking multiple sites and/or multiple chromosomes. Reagents corresponding to noncoding regions of the genes actually are preferred for mapping purposes. Coding sequences are more likely to be conserved within gene families, thus increasing the chance of cross hybridizations during chromosomal mapping.

[0295] Once a sequence has been mapped to a precise chromosomal location, the physical position of the sequence on the chromosome can be correlated with genetic map data. Such data are found, e.g., in McKusick, MENDELIAN INHERITANCE IN MAN, available on-line through Johns Hopkins University Welch Medical Library). The relationship between genes and disease, mapped to the same chromosomal region, can then be identified through linkage analysis (co-inheritance of physically adjacent genes), described in, e.g., Egeland, et al., 1987. Nature, 325: 783-787.

[0296] Moreover, differences in the DNA sequences between individuals affected and unaffected with a disease associated with the NOVX gene, can be determined. If a mutation is observed in some or all of the affected individuals but not in any unaffected individuals, then the mutation is likely to be the causative agent of the particular disease. Comparison of affected and unaffected individuals generally involves first looking for structural alterations in the chromosomes, such as deletions or translocations that are visible from chromosome spreads or detectable using PCR based on that DNA sequence. Ultimately, complete sequencing of genes from several individuals can be performed to confirm the presence of a mutation and to distinguish mutations from polymorphisms.

[0297] Tissue Typing

[0298] The NOVX sequences of the invention can also be used to identify individuals from minute biological samples. In this technique, an individual's genomic DNA is digested with one or more restriction enzymes, and probed on a Southern blot to yield unique bands for identification. The sequences of the invention are useful as additional DNA markers for RFLP (“restriction fragment length polymorphisms,” described in U.S. Pat. No. 5,272,057).

[0299] Furthermore, the sequences of the invention can be used to provide an alternative technique that determines the actual base-by-base DNA sequence of selected portions of an individual's genome. Thus, the NOVX sequences described herein can be used to prepare two PCR primers from the 5′- and 3′-termini of the sequences. These primers can then be used to amplify an individual's DNA and subsequently sequence it.

[0300] Panels of corresponding DNA sequences from individuals, prepared in this manner, can provide unique individual identifications, as each individual will have a unique set of such DNA sequences due to allelic differences. The sequences of the invention can be used to obtain such identification sequences from individuals and from tissue. The NOVX sequences of the invention uniquely represent portions of the human genome. Allelic variation occurs to some degree in the coding regions of these sequences, and to a greater degree in the noncoding regions. It is estimated that allelic variation between individual humans occurs with a frequency of about once per each 500 bases. Much of the allelic variation is due to single nucleotide polymorphisms (SNPs), which include restriction fragment length polymorphisms (RFLPs).

[0301] Each of the sequences described herein can, to some degree, be used as a standard against which DNA from an individual can be compared for identification purposes. Because greater numbers of polymorphisms occur in the noncoding regions, fewer sequences are necessary to differentiate individuals. The noncoding sequences can comfortably provide positive individual identification with a panel of perhaps 10 to 1,000 primers that each yield a noncoding amplified sequence of 100 bases. If coding sequences, such as those of SEQ ID NOS:2n−1, wherein n is an integer between 1 and 141, are used, a more appropriate number of primers for positive individual identification would be 500-2,000.

[0302] Predictive Medicine

[0303] The invention also pertains to the field of predictive medicine in which diagnostic assays, prognostic assays, pharmacogenomics, and monitoring clinical trials are used for prognostic (predictive) purposes to thereby treat an individual prophylactically. Accordingly, one aspect of the invention relates to diagnostic assays for determining NOVX protein and/or nucleic acid expression as well as NOVX activity, in the context of a biological sample (e.g., blood, serum, cells, tissue) to thereby determine whether an individual is afflicted with a disease or disorder, or is at risk of developing a disorder, associated with aberrant NOVX expression or activity. The disorders include metabolic disorders, diabetes, obesity, infectious disease, anorexia, cancer-associated cachexia, cancer, neurodegenerative disorders, Alzheimer's Disease, Parkinson's Disorder, immune disorders, and hematopoietic disorders, and the various dyslipidemias, metabolic disturbances associated with obesity, the metabolic syndrome X and wasting disorders associated with chronic diseases and various cancers. The invention also provides for prognostic (or predictive) assays for determining whether an individual is at risk of developing a disorder associated with NOVX protein, nucleic acid expression or activity. For example, mutations in a NOVX gene can be assayed in a biological sample. Such assays can be used for prognostic or predictive purpose to thereby prophylactically treat an individual prior to the onset of a disorder characterized by or associated with NOVX protein, nucleic acid expression, or biological activity.

[0304] Another aspect of the invention provides methods for determining NOVX protein, nucleic acid expression or activity in an individual to thereby select appropriate therapeutic or prophylactic agents for that individual (referred to herein as “pharmacogenomics”). Pharmacogenomics allows for the selection of agents (e.g., drugs) for therapeutic or prophylactic treatment of an individual based on the genotype of the individual (e.g., the genotype of the individual examined to determine the ability of the individual to respond to a particular agent.) Yet another aspect of the invention pertains to monitoring the influence of agents (e.g., drugs, compounds) on the expression or activity of NOVX in clinical trials. These and other agents are described in further detail in the following sections.

[0305] Diagnostic Assays

[0306] An exemplary method for detecting the presence or absence of NOVX in a biological sample involves obtaining a biological sample from a test subject and contacting the biological sample with a compound or an agent capable of detecting NOVX protein or nucleic acid (e.g., mRNA, genomic DNA) that encodes NOVX protein such that the presence of NOVX is detected in the biological sample. An agent for detecting NOVX mRNA or genomic DNA is a labeled nucleic acid probe capable of hybridizing to NOVX mRNA or genomic DNA. The nucleic acid probe can be, for example, a full-length NOVX nucleic acid, such as the nucleic acid of SEQ ID NOS:2n−1, wherein n is an integer between 1 and 141, or a portion thereof, such as an oligonucleotide of at least 15, 30, 50, 100, 250 or 500 nucleotides in length and sufficient to specifically hybridize under stringent conditions to NOVX mRNA or genomic DNA. Other suitable probes for use in the diagnostic assays of the invention are described herein.

[0307] An agent for detecting NOVX protein is an antibody capable of binding to NOVX protein, preferably an antibody with a detectable label. Antibodies can be polyclonal, or more preferably, monoclonal. An intact antibody, or a fragment thereof (e.g., Fab or F(ab′)₂) can be used. The term “labeled”, with regard to the probe or antibody, is intended to encompass direct labeling of the probe or antibody by coupling (i.e., physically linking) a detectable substance to the probe or antibody, as well as indirect labeling of the probe or antibody by reactivity with another reagent that is directly labeled. Examples of indirect labeling include detection of a primary antibody using a fluorescently-labeled secondary antibody and end-labeling of a DNA probe with biotin such that it can be detected with fluorescently-labeled streptavidin. The term “biological sample” is intended to include tissues, cells and biological fluids isolated from a subject, as well as tissues, cells and fluids present within a subject. That is, the detection method of the invention can be used to detect NOVX mRNA, protein, or genomic DNA in a biological sample in vitro as well as in vivo. For example, in vitro techniques for detection of NOVX mRNA include Northern hybridizations and in situ hybridizations. In vitro techniques for detection of NOVX protein include enzyme linked immunosorbent assays (ELISAs), Western blots, immunoprecipitations, and immunofluorescence. In vitro techniques for detection of NOVX genomic DNA include Southern hybridizations. Furthermore, in vivo techniques for detection of NOVX protein include introducing into a subject a labeled anti-NOVX antibody. For example, the antibody can be labeled with a radioactive marker whose presence and location in a subject can be detected by standard imaging techniques.

[0308] In one embodiment, the biological sample contains protein molecules from the test subject. Alternatively, the biological sample can contain mRNA molecules from the test subject or genomic DNA molecules from the test subject. A preferred biological sample is a peripheral blood leukocyte sample isolated by conventional means from a subject.

[0309] In another embodiment, the methods further involve obtaining a control biological sample from a control subject, contacting the control sample with a compound or agent capable of detecting NOVX protein, mRNA, or genomic DNA, such that the presence of NOVX protein, mRNA or genomic DNA is detected in the biological sample, and comparing the presence of NOVX protein, mRNA or genomic DNA in the control sample with the presence of NOVX protein, mRNA or genomic DNA in the test sample.

[0310] The invention also encompasses kits for detecting the presence of NOVX in a biological sample. For example, the kit can comprise: a labeled compound or agent capable of detecting NOVX protein or mRNA in a biological sample; means for determining the amount of NOVX in the sample; and means for comparing the amount of NOVX in the sample with a standard. The compound or agent can be packaged in a suitable container. The kit can further comprise instructions for using the kit to detect NOVX protein or nucleic acid.

[0311] Prognostic Assays

[0312] The diagnostic methods described herein can furthermore be utilized to identify subjects having or at risk of developing a disease or disorder associated with aberrant NOVX expression or activity. For example, the assays described herein, such as the preceding diagnostic assays or the following assays, can be utilized to identify a subject having or at risk of developing a disorder associated with NOVX protein, nucleic acid expression or activity. Alternatively, the prognostic assays can be utilized to identify a subject having or at risk for developing a disease or disorder. Thus, the invention provides a method for identifying a disease or disorder associated with aberrant NOVX expression or activity in which a test sample is obtained from a subject and NOVX protein or nucleic acid (e.g., mRNA, genomic DNA) is detected, wherein the presence of NOVX protein or nucleic acid is diagnostic for a subject having or at risk of developing a disease or disorder associated with aberrant NOVX expression or activity. As used herein, a “test sample” refers to a biological sample obtained from a subject of interest. For example, a test sample can be a biological fluid (e.g., serum), cell sample, or tissue.

[0313] Furthermore, the prognostic assays described herein can be used to determine whether a subject can be administered an agent (e.g., an agonist, antagonist, peptidomimetic, protein, peptide, nucleic acid, small molecule, or other drug candidate) to treat a disease or disorder associated with aberrant NOVX expression or activity. For example, such methods can be used to determine whether a subject can be effectively treated with an agent for a disorder. Thus, the invention provides methods for determining whether a subject can be effectively treated with an agent for a disorder associated with aberrant NOVX expression or activity in which a test sample is obtained and NOVX protein or nucleic acid is detected (e.g., wherein the presence of NOVX protein or nucleic acid is diagnostic for a subject that can be administered the agent to treat a disorder associated with aberrant NOVX expression or activity).

[0314] The methods of the invention can also be used to detect genetic lesions in a NOVX gene, thereby determining if a subject with the lesioned gene is at risk for a disorder characterized by aberrant cell proliferation and/or differentiation. In various embodiments, the methods include detecting, in a sample of cells from the subject, the presence or absence of a genetic lesion characterized by at least one of an alteration affecting the integrity of a gene encoding a NOVX-protein, or the misexpression of the NOVX gene. For example, such genetic lesions can be detected by ascertaining the existence of at least one of: (i) a deletion of one or more nucleotides from a NOVX gene; (ii) an addition of one or more nucleotides to a NOVX gene; (iii) a substitution of one or more nucleotides of a NOVX gene, (iv) a chromosomal rearrangement of a NOVX gene; (v) an alteration in the level of a messenger RNA transcript of a NOVX gene, (vi) aberrant modification of a NOVX gene, such as of the methylation pattern of the genomic DNA, (vii) the presence of a non-wild-type splicing pattern of a messenger RNA transcript of a NOVX gene, (viii) a non-wild-type level of a NOVX protein, (ix) allelic loss of a NOVX gene, and (x) inappropriate post-translational modification of a NOVX protein. As described herein, there are a large number of assay techniques known in the art which can be used for detecting lesions in a NOVX gene. A preferred biological sample is a peripheral blood leukocyte sample isolated by conventional means from a subject. However, any biological sample containing nucleated cells may be used, including, for example, buccal mucosal cells.

[0315] In certain embodiments, detection of the lesion involves the use of a probe/primer in a polymerase chain reaction (PCR) (see, e.g., U.S. Pat. Nos. 4,683,195 and 4,683,202), such as anchor PCR or RACE PCR, or, alternatively, in a ligation chain reaction (LCR) (see, e.g., Landegran, et al., 1988. Science 241: 1077-1080; and Nakazawa, et al., 1994. Proc. Natl. Acad. Sci. USA 91: 360-364), the latter of which can be particularly useful for detecting point mutations in the NOVX-gene (see, Abravaya, et al., 1995. Nucl. Acids Res. 23: 675-682). This method can include the steps of collecting a sample of cells from a patient, isolating nucleic acid (e.g., genomic, mRNA or both) from the cells of the sample, contacting the nucleic acid sample with one or more primers that specifically hybridize to a NOVX gene under conditions such that hybridization and amplification of the NOVX gene (if present) occurs, and detecting the presence or absence of an amplification product, or detecting the size of the amplification product and comparing the length to a control sample. It is anticipated that PCR and/or LCR may be desirable to use as a preliminary amplification step in conjunction with any of the techniques used for detecting mutations described herein.

[0316] Alternative amplification methods include: self sustained sequence replication (see, Guatelli, et al., 1990. Proc. Natl. Acad. Sci. USA 87: 1874-1878), transcriptional amplification system (see, Kwoh, et al., 1989. Proc. Natl. Acad. Sci. USA 86: 1173-1177); Qβ Replicase (see, Lizardi, et al, 1988. BioTechnology 6: 1197), or any other nucleic acid amplification method, followed by the detection of the amplified molecules using techniques well known to those of skill in the art. These detection schemes are especially useful for the detection of nucleic acid molecules if such molecules are present in very low numbers.

[0317] In an alternative embodiment, mutations in a NOVX gene from a sample cell can be identified by alterations in restriction enzyme cleavage patterns. For example, sample and control DNA is isolated, amplified (optionally), digested with one or more restriction endonucleases, and fragment length sizes are determined by gel electrophoresis and compared. Differences in fragment length sizes between sample and control DNA indicates mutations in the sample DNA. Moreover, the use of sequence specific ribozymes (see, e.g., U.S. Pat. No. 5,493,531) can be used to score for the presence of specific mutations by development or loss of a ribozyme cleavage site.

[0318] In other embodiments, genetic mutations in NOVX can be identified by hybridizing sample and control nucleic acids, e.g., DNA or RNA to high-density arrays containing hundreds or thousands of oligonucleotide probes. See, e.g., Cronin, et al., 1996. Human Mutation 7: 244-255; Kozal, et al., 1996. Nat. Med. 2: 753-759. For example, genetic mutations in NOVX can be identified in two-dimensional arrays containing light-generated DNA probes as described in Cronin, et al., supra. Briefly, a first hybridization array of probes can be used to scan through long stretches of DNA in a sample and control to identify base changes between the sequences by making linear arrays of sequential overlapping probes. This step allows the identification of point mutations. This is followed by a second hybridization array that allows the characterization of specific mutations by using smaller, specialized probe arrays complementary to all variants or mutations detected. Each mutation array is composed of parallel probe sets, one complementary to the wild-type gene and the other complementary to the mutant gene.

[0319] In yet another embodiment, any of a variety of sequencing reactions known in the art can be used to directly sequence the NOVX gene and detect mutations by comparing the sequence of the sample NOVX with the corresponding wild-type (control) sequence. Examples of sequencing reactions include those based on techniques developed by Maxim and Gilbert, 1977. Proc. Natl. Acad. Sci. USA 74: 560 or Sanger, 1977. Proc. Natl. Acad. Sci. USA 74: 5463. It is also contemplated that any of a variety of automated sequencing procedures can be utilized when performing the diagnostic assays (see, e.g., Naeve, et al., 1995. Biotechniques 19: 448), including sequencing by mass spectrometry (see, e.g., PCT International Publication No. WO 94/16101; Cohen, et al., 1996. Adv. Chromatography 36: 127-162; and Griffin, et al., 1993. Appl. Biochem. Biotechnol. 38: 147-159).

[0320] Other methods for detecting mutations in the NOVX gene include methods in which protection from cleavage agents is used to detect mismatched bases in RNA/RNA or RNA/DNA heteroduplexes. See, e.g., Myers, et al., 1985. Science 230: 1242. In general, the art technique of “mismatch cleavage” starts by providing heteroduplexes of formed by hybridizing (labeled) RNA or DNA containing the wild-type NOVX sequence with potentially mutant RNA or DNA obtained from a tissue sample. The double-stranded duplexes are treated with an agent that cleaves single-stranded regions of the duplex such as which will exist due to basepair mismatches between the control and sample strands. For instance, RNA/DNA duplexes can be treated with RNase and DNA/DNA hybrids treated with S₁ nuclease to enzymatically digesting the mismatched regions. In other embodiments, either DNA/DNA or RNA/DNA duplexes can be treated with hydroxylamine or osmium tetroxide and with piperidine in order to digest mismatched regions. After digestion of the mismatched regions, the resulting material is then separated by size on denaturing polyacrylamide gels to determine the site of mutation. See, e.g., Cotton, et al., 1988. Proc. Natl Acad. Sci. USA 85: 4397; Saleeba, et al., 1992. Methods Enzymol. 217: 286-295. In an embodiment, the control DNA or RNA can be labeled for detection.

[0321] In still another embodiment, the mismatch cleavage reaction employs one or more proteins that recognize mismatched base pairs in double-stranded DNA (so called “DNA mismatch repair” enzymes) in defined systems for detecting and mapping point mutations in NOVX cDNAs obtained from samples of cells. For example, the mutY enzyme of E. coli cleaves A at G/A mismatches and the thymidine DNA glycosylase from HeLa cells cleaves T at G/T mismatches. See, e.g., Hsu, et al., 1994. Carcinogenesis 15: 1657-1662. According to an exemplary embodiment, a probe based on a NOVX sequence, e.g., a wild-type NOVX sequence, is hybridized to a cDNA or other DNA product from a test cell(s). The duplex is treated with a DNA mismatch repair enzyme, and the cleavage products, if any, can be detected from electrophoresis protocols or the like. See, e.g., U.S. Pat. No. 5,459,039.

[0322] In other embodiments, alterations in electrophoretic mobility will be used to identify mutations in NOVX genes. For example, single strand conformation polymorphism (SSCP) may be used to detect differences in electrophoretic mobility between mutant and wild type nucleic acids. See, e.g., Orita, et al., 1989. Proc. Natl. Acad. Sci. USA: 86: 2766; Cotton, 1993. Mutat. Res. 285: 125-144; Hayashi, 1992. Genet. Anal. Tech. Appl. 9: 73-79. Single-stranded DNA fragments of sample and control NOVX nucleic acids will be denatured and allowed to renature. The secondary structure of single-stranded nucleic acids varies according to sequence, the resulting alteration in electrophoretic mobility enables the detection of even a single base change. The DNA fragments may be labeled or detected with labeled probes. The sensitivity of the assay may be enhanced by using RNA (rather than DNA), in which the secondary structure is more sensitive to a change in sequence. In one embodiment, the subject method utilizes heteroduplex analysis to separate double stranded heteroduplex molecules on the basis of changes in electrophoretic mobility. See, e.g., Keen, et al., 1991. Trends Genet. 7: 5.

[0323] In yet another embodiment, the movement of mutant or wild-type fragments in polyacrylamide gels containing a gradient of denaturant is assayed using denaturing gradient gel electrophoresis (DGGE). See, e.g., Myers, et al., 1985. Nature 313: 495. When DGGE is used as the method of analysis, DNA will be modified to insure that it does not completely denature, for example by adding a GC clamp of approximately 40 bp of high-melting GC-rich DNA by PCR. In a further embodiment, a temperature gradient is used in place of a denaturing gradient to identify differences in the mobility of control and sample DNA. See, e.g., Rosenbaum and Reissner, 1987. Biophys. Chem. 265: 12753.

[0324] Examples of other techniques for detecting point mutations include, but are not limited to, selective oligonucleotide hybridization, selective amplification, or selective primer extension. For example, oligonucleotide primers may be prepared in which the known mutation is placed centrally and then hybridized to target DNA under conditions that permit hybridization only if a perfect match is found. See, e.g., Saiki, et al., 1986. Nature 324: 163; Saiki, et al., 1989. Proc. Natl. Acad. Sci. USA 86: 6230. Such allele specific oligonucleotides are hybridized to PCR amplified target DNA or a number of different mutations when the oligonucleotides are attached to the hybridizing membrane and hybridized with labeled target DNA.

[0325] Alternatively, allele specific amplification technology that depends on selective PCR amplification may be used in conjunction with the instant invention. Oligonucleotides used as primers for specific amplification may carry the mutation of interest in the center of the molecule (so that amplification depends on differential hybridization; see, e.g., Gibbs, et al., 1989. Nucl. Acids Res. 17: 2437-2448) or at the extreme 3′-terminus of one primer where, under appropriate conditions, mismatch can prevent, or reduce polymerase extension (see, e.g., Prossner, 1993. Tibtech. 11: 238). In addition it may be desirable to introduce a novel restriction site in the region of the mutation to create cleavage-based detection. See, e.g., Gasparini, et al., 1992. Mol. Cell Probes 6: 1. It is anticipated that in certain embodiments amplification may also be performed using Taq ligase for amplification. See, e.g., Barany, 1991. Proc. Natl. Acad. Sci. USA 88: 189. In such cases, ligation will occur only if there is a perfect match at the 3′-terminus of the 5′ sequence, making it possible to detect the presence of a known mutation at a specific site by looking for the presence or absence of amplification.

[0326] The methods described herein may be performed, for example, by utilizing pre-packaged diagnostic kits comprising at least one probe nucleic acid or antibody reagent described herein, which may be conveniently used, e.g., in clinical settings to diagnose patients exhibiting symptoms or family history of a disease or illness involving a NOVX gene.

[0327] Furthermore, any cell type or tissue, preferably peripheral blood leukocytes, in which NOVX is expressed may be utilized in the prognostic assays described herein. However, any biological sample containing nucleated cells may be used, including, for example, buccal mucosal cells.

[0328] Pharmacogenomics

[0329] Agents, or modulators that have a stimulatory or inhibitory effect on NOVX activity (e.g., NOVX gene expression), as identified by a screening assay described herein can be administered to individuals to treat (prophylactically or therapeutically) disorders (The disorders include metabolic disorders, diabetes, obesity, infectious disease, anorexia, cancer-associated cachexia, cancer, neurodegenerative disorders, Alzheimer's Disease, Parkinson's Disorder, immune disorders, and hematopoietic disorders, and the various dyslipidemias, metabolic disturbances associated with obesity, the metabolic syndrome X and wasting disorders associated with chronic diseases and various cancers.) In conjunction with such treatment, the pharmacogenomics (i.e., the study of the relationship between an individual's genotype and that individual's response to a foreign compound or drug) of the individual may be considered. Differences in metabolism of therapeutics can lead to severe toxicity or therapeutic failure by altering the relation between dose and blood concentration of the pharmacologically active drug. Thus, the pharmacogenomics of the individual permits the selection of effective agents (e.g., drugs) for prophylactic or therapeutic treatments based on a consideration of the individual's genotype. Such pharmacogenomics can further be used to determine appropriate dosages and therapeutic regimens. Accordingly, the activity of NOVX protein, expression of NOVX nucleic acid, or mutation content of NOVX genes in an individual can be determined to thereby select appropriate agent(s) for therapeutic or prophylactic treatment of the individual.

[0330] Pharmacogenomics deals with clinically significant hereditary variations in the response to drugs due to altered drug disposition and abnormal action in affected persons. See e.g., Eichelbaum, 1996. Clin. Exp. Pharmacol. Physiol., 23: 983-985; Linder, 1997. Clin. Chem., 43: 254-266. In general, two types of pharmacogenetic conditions can be differentiated. Genetic conditions transmitted as a single factor altering the way drugs act on the body (altered drug action) or genetic conditions transmitted as single factors altering the way the body acts on drugs (altered drug metabolism). These pharmacogenetic conditions can occur either as rare defects or as polymorphisms. For example, glucose-6-phosphate dehydrogenase (G6PD) deficiency is a common inherited enzymopathy in which the main clinical complication is hemolysis after ingestion of oxidant drugs (anti-malarials, sulfonamides, analgesics, nitrofurans) and consumption of fava beans.

[0331] As an illustrative embodiment, the activity of drug metabolizing enzymes is a major determinant of both the intensity and duration of drug action. The discovery of genetic polymorphisms of drug metabolizing enzymes (e.g. N-acetyltransferase 2 (NAT 2) and cytochrome Pregnancy Zone Protein Precursor enzymes CYP2D6 and CYP2C19) has provided an explanation as to why some patients do not obtain the expected drug effects or show exaggerated drug response and serious toxicity after taking the standard and safe dose of a drug. These polymorphisms are expressed in two phenotypes in the population, the extensive metabolizer (EM) and poor metabolizer (PM). The prevalence of PM is different among different populations. For example, the gene coding for CYP2D6 is highly polymorphic and several mutations have been identified in PM, which all lead to the absence of functional CYP2D6. Poor metabolizers of CYP2D6 and CYP2C 19 quite frequently experience exaggerated drug response and side effects when they receive standard doses. If a metabolite is the active therapeutic moiety, PM show no therapeutic response, as demonstrated for the analgesic effect of codeine mediated by its CYP2D6-formed metabolite morphine. At the other extreme are the so called ultra-rapid metabolizers who do not respond to standard doses. Recently, the molecular basis of ultra-rapid metabolism has been identified to be due to CYP2D6 gene amplification.

[0332] Thus, the activity of NOVX protein, expression of NOVX nucleic acid, or mutation content of NOVX genes in an individual can be determined to thereby select appropriate agent(s) for therapeutic or prophylactic treatment of the individual. In addition, pharmacogenetic studies can be used to apply genotyping of polymorphic alleles encoding drug-metabolizing enzymes to the identification of an individual's drug responsiveness phenotype. This knowledge, when applied to dosing or drug selection, can avoid adverse reactions or therapeutic failure and thus enhance therapeutic or prophylactic efficiency when treating a subject with a NOVX modulator, such as a modulator identified by one of the exemplary screening assays described herein.

[0333] Monitoring of Effects During Clinical Trials

[0334] Monitoring the influence of agents (e.g., drugs, compounds) on the expression or activity of NOVX (e.g., the ability to modulate aberrant cell proliferation and/or differentiation) can be applied not only in basic drug screening, but also in clinical trials. For example, the effectiveness of an agent determined by a screening assay as described herein to increase NOVX gene expression, protein levels, or upregulate NOVX activity, can be monitored in clinical trails of subjects exhibiting decreased NOVX gene expression, protein levels, or downregulated NOVX activity. Alternatively, the effectiveness of an agent determined by a screening assay to decrease NOVX gene expression, protein levels, or downregulate NOVX activity, can be monitored in clinical trails of subjects exhibiting increased NOVX gene expression, protein levels, or upregulated NOVX activity. In such clinical trials, the expression or activity of NOVX and, preferably, other genes that have been implicated in, for example, a cellular proliferation or immune disorder can be used as a “read out” or markers of the immune responsiveness of a particular cell.

[0335] By way of example, and not of limitation, genes, including NOVX, that are modulated in cells by treatment with an agent (e.g., compound, drug or small molecule) that modulates NOVX activity (e.g., identified in a screening assay as described herein) can be identified. Thus, to study the effect of agents on cellular proliferation disorders, for example, in a clinical trial, cells can be isolated and RNA prepared and analyzed for the levels of expression of NOVX and other genes implicated in the disorder. The levels of gene expression (i.e., a gene expression pattern) can be quantified by Northern blot analysis or RT-PCR, as described herein, or alternatively by measuring the amount of protein produced, by one of the methods as described herein, or by measuring the levels of activity of NOVX or other genes. In this manner, the gene expression pattern can serve as a marker, indicative of the physiological response of the cells to the agent. Accordingly, this response state may be determined before, and at various points during, treatment of the individual with the agent.

[0336] In one embodiment, the invention provides a method for monitoring the effectiveness of treatment of a subject with an agent (e.g., an agonist, antagonist, protein, peptide, peptidomimetic, nucleic acid, small molecule, or other drug candidate identified by the screening assays described herein) comprising the steps of (i) obtaining a pre-administration sample from a subject prior to administration of the agent; (ii) detecting the level of expression of a NOVX protein, mRNA, or genomic DNA in the preadministration sample; (iii) obtaining one or more post-administration samples from the subject; (iv) detecting the level of expression or activity of the NOVX protein, mRNA, or genomic DNA in the post-administration samples; (v) comparing the level of expression or activity of the NOVX protein, mRNA, or genomic DNA in the pre-administration sample with the NOVX protein, mRNA, or genomic DNA in the post administration sample or samples; and (vi) altering the administration of the agent to the subject accordingly. For example, increased administration of the agent may be desirable to increase the expression or activity of NOVX to higher levels than detected, i.e., to increase the effectiveness of the agent. Alternatively, decreased administration of the agent may be desirable to decrease expression or activity of NOVX to lower levels than detected, i.e., to decrease the effectiveness of the agent.

[0337] Methods of Treatment

[0338] The invention provides for both prophylactic and therapeutic methods of treating a subject at risk of (or susceptible to) a disorder or having a disorder associated with aberrant NOVX expression or activity. The disorders include cardiomyopathy, atherosclerosis, hypertension, congenital heart defects, aortic stenosis, atrial septal defect (ASD), atrioventricular (A-V) canal defect, ductus arteriosus, pulmonary stenosis, subaortic stenosis, ventricular septal defect (VSD), valve diseases, tuberous sclerosis, scleroderma, obesity, transplantation, adrenoleukodystrophy, congenital adrenal hyperplasia, prostate cancer, neoplasm; adenocarcinoma, lymphoma, uterus cancer, fertility, hemophilia, hypercoagulation, idiopathic thrombocytopenic purpura, immunodeficiencies, graft versus host disease, AIDS, bronchial asthma, Crohn's disease; multiple sclerosis, treatment of Albright Hereditary Ostocodystrophy, and other diseases, disorders and conditions of the like.

[0339] These methods of treatment will be discussed more fully, below.

[0340] Diseases and Disorders

[0341] Diseases and disorders that are characterized by increased (relative to a subject not suffering from the disease or disorder) levels or biological activity may be treated with Therapeutics that antagonize (i.e., reduce or inhibit) activity. Therapeutics that antagonize activity may be administered in a therapeutic or prophylactic manner. Therapeutics that may be utilized include, but are not limited to: (i) an aforementioned peptide, or analogs, derivatives, fragments or homologs thereof, (ii) antibodies to an aforementioned peptide; (iii) nucleic acids encoding an aforementioned peptide; (iv) administration of antisense nucleic acid and nucleic acids that are “dysfunctional” (i.e., due to a heterologous insertion within the coding sequences of coding sequences to an aforementioned peptide) that are utilized to “knockout” endogenous function of an aforementioned peptide by homologous recombination (see, e.g., Capecchi, 1989. Science 244: 1288-1292); or (v) modulators (i.e., inhibitors, agonists and antagonists, including additional peptide mimetic of the invention or antibodies specific to a peptide of the invention) that alter the interaction between an aforementioned peptide and its binding partner.

[0342] Diseases and disorders that are characterized by decreased (relative to a subject not suffering from the disease or disorder) levels or biological activity may be treated with Therapeutics that increase (i.e., are agonists to) activity. Therapeutics that upregulate activity may be administered in a therapeutic or prophylactic manner. Therapeutics that may be utilized include, but are not limited to, an aforementioned peptide, or analogs, derivatives, fragments or homologs thereof; or an agonist that increases bioavailability.

[0343] Increased or decreased levels can be readily detected by quantifying peptide and/or RNA, by obtaining a patient tissue sample (e.g., from biopsy tissue) and assaying it in vitro for RNA or peptide levels, structure and/or activity of the expressed peptides (or mRNAs of an aforementioned peptide). Methods that are well-known within the art include, but are not limited to, immunoassays (e.g., by Western blot analysis, immunoprecipitation followed by sodium dodecyl sulfate (SDS) polyacrylamide gel electrophoresis, immunocytochemistry, etc.) and/or hybridization assays to detect expression of mRNAs (e.g., Northern assays, dot blots, in situ hybridization, and the like).

[0344] Prophylactic Methods

[0345] In one aspect, the invention provides a method for preventing, in a subject, a disease or condition associated with an aberrant NOVX expression or activity, by administering to the subject an agent that modulates NOVX expression or at least one NOVX activity. Subjects at risk for a disease that is caused or contributed to by aberrant NOVX expression or activity can be identified by, for example, any or a combination of diagnostic or prognostic assays as described herein. Administration of a prophylactic agent can occur prior to the manifestation of symptoms characteristic of the NOVX aberrancy, such that a disease or disorder is prevented or, alternatively, delayed in its progression. Depending upon the type of NOVX aberrancy, for example, a NOVX agonist or NOVX antagonist agent can be used for treating the subject. The appropriate agent can be determined based on screening assays described herein. The prophylactic methods of the invention are further discussed in the following subsections.

[0346] Therapeutic Methods

[0347] Another aspect of the invention pertains to methods of modulating NOVX expression or activity for therapeutic purposes. The modulatory method of the invention involves contacting a cell with an agent that modulates one or more of the activities of NOVX protein activity associated with the cell. An agent that modulates NOVX protein activity can be an agent as described herein, such as a nucleic acid or a protein, a naturally-occurring cognate ligand of a NOVX protein, a peptide, a NOVX peptidomimetic, or other small molecule. In one embodiment, the agent stimulates one or more NOVX protein activity. Examples of such stimulatory agents include active NOVX protein and a nucleic acid molecule encoding NOVX that has been introduced into the cell. In another embodiment, the agent inhibits one or more NOVX protein activity. Examples of such inhibitory agents include antisense NOVX nucleic acid molecules and anti-NOVX antibodies. These modulatory methods can be performed in vitro (e.g., by culturing the cell with the agent) or, alternatively, in vivo (e.g., by administering the agent to a subject). As such, the invention provides methods of treating an individual afflicted with a disease or disorder characterized by aberrant expression or activity of a NOVX protein or nucleic acid molecule. In one embodiment, the method involves administering an agent (e.g., an agent identified by a screening assay described herein), or combination of agents that modulates (e.g., up-regulates or down-regulates) NOVX expression or activity. In another embodiment, the method involves administering a NOVX protein or nucleic acid molecule as therapy to compensate for reduced or aberrant NOVX expression or activity.

[0348] Stimulation of NOVX activity is desirable in situations in which NOVX is abnormally downregulated and/or in which increased NOVX activity is likely to have a beneficial effect. One example of such a situation is where a subject has a disorder characterized by aberrant cell proliferation and/or differentiation (e.g., cancer or immune associated disorders). Another example of such a situation is where the subject has a gestational disease (e.g., preclampsia).

[0349] Determination of the Biological Effect of the Therapeutic

[0350] In various embodiments of the invention, suitable in vitro or in vivo assays are performed to determine the effect of a specific Therapeutic and whether its administration is indicated for treatment of the affected tissue.

[0351] In various specific embodiments, in vitro assays may be performed with representative cells of the type(s) involved in the patient's disorder, to determine if a given Therapeutic exerts the desired effect upon the cell type(s). Compounds for use in therapy may be tested in suitable animal model systems including, but not limited to rats, mice, chicken, cows, monkeys, rabbits, and the like, prior to testing in human subjects. Similarly, for in vivo testing, any of the animal model system known in the art may be used prior to administration to human subjects.

[0352] Prophylactic and Therapeutic Uses of the Compositions of the Invention

[0353] The NOVX nucleic acids and proteins of the invention are useful in potential prophylactic and therapeutic applications implicated in a variety of disorders including, but not limited to: metabolic disorders, diabetes, obesity, infectious disease, anorexia, cancer-associated cancer, neurodegenerative disorders, Alzheimer's Disease, Parkinson's Disorder, immune disorders, hematopoietic disorders, and the various dyslipidemias, metabolic disturbances associated with obesity, the metabolic syndrome X and wasting disorders associated with chronic diseases and various cancers.

[0354] As an example, a cDNA encoding the NOVX protein of the invention may be useful in gene therapy, and the protein may be useful when administered to a subject in need thereof. By way of non-limiting example, the compositions of the invention will have efficacy for treatment of patients suffering from: metabolic disorders, diabetes, obesity, infectious disease, anorexia, cancer-associated cachexia, cancer, neurodegenerative disorders, Alzheimer's Disease, Parkinson's Disorder, immune disorders, hematopoietic disorders, and the various dyslipidemias.

[0355] Both the novel nucleic acid encoding the NOVX protein, and the NOVX protein of the invention, or fragments thereof, may also be useful in diagnostic applications, wherein the presence or amount of the nucleic acid or the protein are to be assessed. A further use could be as an anti-bacterial molecule (i.e., some peptides have been found to possess anti-bacterial properties). These materials are further useful in the generation of antibodies, which immunospecifically-bind to the novel substances of the invention for use in therapeutic or diagnostic methods.

[0356] The invention will be further described in the following examples, which do not limit the scope of the invention described in the claims.

### EXAMPLES

### Example A

### Polynucleotide And Polypeptide Sequences, And Homology Data

### Example 1

[0357] The NOV1 clone was analyzed, and the nucleotide and encoded polypeptide sequences are shown in Table 1A.

TABLE 1A
NOV1 Sequence Analysis

| | | |
|---|---|---|
| NOV1a, CG103945-02 | SEQ ID NO: 1 | 2414 bp |
| DNA Sequence | ORF Start: ATG at 1 | ORF Stop: TAG at 2401 |

ATGGCCCCCTCGGCCTGGGCCATTTGCTGGCTGCTAGGGGGCCTCCTGCTCCATGGGGGTAGCTCTGGCCCCA
GCCCCGGCCCCAGTGTGCCCCGCCTGCGGCTCTCCTACCGAGGAGCCGTGGTCCGAAAGCCTTCCAGCACCAT
GTGGATGGAAACATTTTCCAGATACCTCCTGTCTGCCAACCGCTCTGCCATCTTTCTGGGCCCCCAGGGCTCC
CTGAACCTCCAGGCCATGTACCTAGATGAGTACCGAGACCGCCTCTTTCTGGGTGGCCTGGACGCCCTCTACT
CTCTGCGGCTGGACCAGGCATGGCCAGATCCCCGGGAGGTCCTGTGGCCACCGCAGCCAGGACAGAGGGAGGA
GTGTGTTCGAAAGGGAAGAGATCCTTTGACAGAGTGCGCCAACTTCGTGCGGGTGCTACAGCCTCACAACCGG
ACCCACCTGCTAGCCTGTGGCACTGGGGCCTTCCAGCCCACCTGTGCCCTCATCACAGTTGGCCACCGTGGGG
AGCATGTGCTCCACCTGGAGCCTGGCAGTGTGGAAAGTGGCCGGGGGCGGTGCCCTCACGAGCCCAGCCGTCC
CTTTGCCAGCACCTTCATAGACGGGGAGCTGTACACGGGTCTCACTGCTGACTTCCTGGGGCGAGAGGCCATG
ATCTTCCGAAGTGGAGGTCCTCGGCCAGCTCTGCGTTCCGACTCTGACCAGAGTCTCTTGCACGACCCCCGGT
TTGTGATGGCCGCCCGGATCCCTGAGAACTCTGACCAGGACAATGACAAGGTGTACTTCTTCTTCTCGGAGAC
GGTCCCCTCGCCCGATGGTGGCTCGAACCATGTCACTGTCAGCCGCGTGGGCCGCGTCTGCGTGAATGATGCT
GGGGGCCAGCGGGTGCTGGTGAACAAATGGAGCACTTTCCTCAAGGCCAGGCTGGTCTGCTCGGTGCCCGGCC
CTGGTGGTGCCGAGACCCACTTTGACCAGCTAGAGGATGTGTTCCTGCTGTGGCCCAAGGCCGGGAAGAGCCT
CGAGGTGTACGCGCTGTTCAGCACCGTCAGTGCCGTGTTCCAGGGCTTCGCCGTCTGTGTGTACCACATGGCA
GACATCTGGGAGGTTTTCAACGGGCCCTTTGCCCACCGAGATGGGCCTCAGCACCAGTGGGGGCCCTATGGGG
GCAAGGTGCCCTTCCCTCGCCCTGGCGTGTGCCCCAGCAAGATGACCGCACAGCCAGGACGGCCTTTTGGCAG
CACCAAGGACTACCCAGATGAGGTGCTGCAGTTTGCCCGAGCCCACCCCCTCATGTTCTGGCCTGTGCGGCCT
CGACATGGCCGCCCTGTCCTTGTCAAGACCCACCTGGCCCAGCAGCTACACCAGATCGTGGTGGACCGCGTGG
AGGCAGAGGATGGGACCTACGATGTCATTTTCCTGGGGACTGACTCAGGGTCTGTGCTCAAAGTCATCGCTCT
CCAGGCAGGGGGCTCAGCTGAACCTGAGGAAGTGGTTCTGGAGGAGCTCCAGGTGTTTAAGGTGCCAACACCT
ATCACCGAAATGGAGATCTCTGTCAAAAGGCAAATGCTATACGTGGGCTCTCGGCTGGGTGTGGCCCAGCTGC
GGCTGCACCAATGTGAGACTTACGGCACTGCCTGTGCAGAGTGCTGCCTGGCCCGGGACCCATACTGTGCCTG
GGATGGTGCCTCCTGTACCCACTACCGCCCCAGCCTTGGCAACCGCCGGTTCCGCCGGCAGGACATCCGGCAC
GGCAACCCTGCCCTGCAGTGCCTGGGCCAGAGCCAGGAAGAAGAGGCAGTGGGACTTGTGGCAGCCACCATGG
TCTACGGCACGGAGCACAATAGCACCTTCCTGGAGTGCCTGCCCAAGTCTCCCCAGGCTGCTGTGCGCTGGCT
CTTGCAGAGGCCAGGGGATGAGGGGCCTGACCAGGTGAAGACGGACGAGCGAGTCTTGCACACGGAGCGGGGG
CTGCTGTTCCGCAGGCTTAGCCGTTTCGATGCGGGCACCTACACCTGCACCACTCTGGAGCATGGCTTCTCCC
AGACTGTGGTCCGCCTGGCTCTGGTGGTGATTGTGGCCTCACAGCTGGACAACCTGTTCCCTCCGGAGCCAAA
GCCAGAGGAGCCCCCAGCCCGGGGAGGCCTGGCTTCCACCCCACCCAAGGCCTGGTACAAGGACATCCTGCAG
CTCATTGGCTTCGCCAACCTGCCCCGGGTGGATGAGTACTGTGAGCGCGTGTGGTGCAGGGGCACCACGGAAT
GCTCAGGCTGCTTCCGGAGCCGGAGCCGGGGCAAGCAGGCCAGGGGCAAGAGCTGGGCAGGGCTGGAGCTAGG
CAAGAAGATGAAGAGCCGGGTGCATGCCGAGCACAATCGGACGCCCCGGGAGGTGGAGGCCACGTAGAAGGGG
GCAGA

| | | | |
|---|---|---|---|
| NOV1a, CG103945-02 | | | |
| Protein Sequence | SEQ ID NO: 2 | 800 aa | MW at 88800.3kD |

MAPSAWAICWLLGGLLLHGGSSGPSPGPSVPRLRLSYRGAVVRKPSSTMWMETFSRYLLSANRSAIFLGPQGS
LNLQAMYLDEYRDRLFLGGLDALYSLRLDQAWPDPREVLWPPQPGQREECVRKGRDPLTECANFVRVLQPHNR
THLLACGTGAFQPTCALITVGHRGEHVLHLEPGSVESGRGRCPHEPSRPFASTFIDGELYTGLTADFLGREAM
IFRSGGPRPALRSDSDQSLLHDPRFVMAARIPENSDQDNDKVYFFFSETVPSPDGGSNHVTVSRVGRVCVNDA
GGQRVLVNKWSTFLKARLVCSVPGPGGAETHFDQLEDVFLLWPKAGKSLEVYALFSTVSAVFQGFAVCVYHMA
DIWEVFNGPFAHRDGPQHQWGPYGGKVPFPRPGVCPSKMTAQPGRPFGSTKDYPDEVLQFARAHPLMFWPVRP
RHGRPVLVKTHLAQQLHQIVVDRVEAEDGTYDVIFLGTDSGSVLKVIALQAGGSAEPEEVVLEELQVFKVPTP
ITEMEISVKRQMLYVGSRLGVAQLRLHQCETYGTACAECCLARDPYCAWDGASCTHYRPSLGKRRFRRQDIRH
GNPALQCLGQSQEEEAVGLVAATMVYGTEHNSTFLECLPKSPQAAVRWLLQRPGDEGPDQVKTDERVLHTERG
LLFRRLSRFDAGTYTCTTLEHGFSQTVVRLALVVIVASQLDNLFPPEPKPEEPPARGGLASTPPKAWYKDILQ
LIGFANLPRVDEYCERVWCRGTTECSGCFRSRSRGKQARGKSWAGLELGKKMKSRVHAEHNRTPREVEAT

| | | |
|---|---|---|
| NOV1b, CG103945-01 | SEQ ID NO: 3 | 4700 bp |
| DNA Sequence | ORF Start: ATG at 1 | ORF Stop: TAG at 2347 |

ATGGCCCCCTCGGCCTGGGCCATTTGCTGGCTGCTAGGGGGCCTCCTGCTCCATGGGGGTAGCTCTGGCCCCA
GCCCCGGCCCCAGTGTGCCCCGCCTGCGGCTCTCCTACCGAGACCTCCTGTCTGCCAACCGCTCTGCCATCTT
TCTGGGCCCCCAGGGCTCCCTGAACCTCCAGGCCATGTACCTAGATGAGTACCGAGACCGCCTCTTTCTGGGT
GGCCTGGACGCCCTCTACTCTCTGCGGCTGGACCAGGCATGGCCAGATCCCCGGGAGGTCCTGTGGCCACCGC
AGCCAGGACAGAGGGAGGAGTGTGTTCGAAAGGGAAGAGATCCTTTGACAGAGTGCGCCAACTTCGTGCGGGT
GCTACAGCCTCACAACCGGACCCACCTGCTAGCCTGTGGCACTGGGGCCTTCCAGCCCACCTGTGCCCTCATC
ACAGTTGGCCACCGTGGGGAGCATGTGCTCCACCTGGAGCCTGGCAGTGTGGAAAGTGGCCGGGGGCGGTGCC
CTCACGAGCCCAGCCGTCCCTTTGCCAGCACCTTCATAGACGGGGAGCTGTACACGGGTCTCACTGCTGACTT
CCTGGGGCGAGAGGCCATGATCTTCCGAAGTGGAGGTCCTCGGCCAGCTCTGCGTTCCGACTCTGACCAGAGT
CTCTTGCACGACCCCCGGTTTGTGATGGCCGCCCGGATCCCTGAGAACTCTGACCAGGACAATGACAAGGTGT
ACTTCTTCTTCTCGGAGACGGTCCCCTCGCCCGATGGTGGCTCGAACCATGTCACTGTCAGCCGCGTGGGCCG
CGTCTGCGTGAATGATGCTGGGGGCCAGCGGGTGCTGGTGAACAAATGGAGCACTTTCCTCAAGGCCAGGCTG
GTCTGCTCGGTGCCCGGCCCTGGTGGTGCCGAGACCCACTTTGACCAGCTAGAGGATGTGTTCCTGCTGTGGC
CCAAGGCCGGGAAGAGCCTCGAGGTGTACGCGCTGTTCAGCACCGTCAGTGCCGTGTTCCAGGGCTTCGCCGT
CTGTGTGTACCACATGGCAGACATCTGGGAGGTTTTCAACGGGCCCTTTGCCCACCGAGATGGGCCTCAGCAC
CAGTGGGGGCCCTATGGGGGCAAGGTGCCCTTCCCTCGCCCTGGCGTGTGCCCCAGCAAGATGACCGCACAGC
CAGGACGGCCTTTTGGCAGCACCAAGGACTACCCAGATGAGGTGCTGCAGTTTGCCCGAGCCCACCCCCTCAT
GTTCTGGCCTGTGCGGCCTCGACATGGCCGCCCTGTCCTTGTCAAGACCCACCTGGCCCAGCAGCTACACCAG
ATCGTGGTGGACCGCGTGGAGGCAGAGGATGGGACCTACGATGTCATTTTCCTGGGGACTGACTCAGGGTCTG
TGCTCAAAGTCATCGCTCTCCAGGCAGGGGGCTCAGCTGAACCTGAGGAAGTGGTTCTGGAGGAGCTCCAGGT
GTTTAAGGTGCCAACACCTATCACCGAAATGGAGATCTCTGTCAAAAGGCAAATGCTATACGTGGGCTCTCGG
CTGGGTGTGGCCCAGCTGCGGCTGCACCAATGTGAGACTTACGGCACTGCCTGTGCAGAGTGCTGCCTGGCCC
GGGACCCATACTGTGCCTGGGATGGTGCCTCCTGTACCCACTACCGCCCCAGCCTTGGCAAGCGCCGGTTCCG
CCGGCAGGACATCCGGCACGGCAACCCTGCCCTGCAGTGCCTGGGCCAGAGCCAGGAAGAAGAGGCAGTGGGA
CTTGTGGCAGCCACCATGGTCTACGGCACGGAGCACAATAGCACCTTCCTGGAGTGCCTGCCCAAGTCTCCCC
AGGCTGCTGTGCGCTGGCTCTTGCAGAGGCCAGGGGATGAGGGGCCTGACCAGGTGAAGACGGACGAGCGAGT
CTTGCACACGGAGCGGGGGCTGCTGTTCCGCAGGCTTAGCCGTTTCGATGCGGGCACCTACACCTGCACCACT
CTGGAGCATGGCTTCTCCCAGACTGTGGTCCGCCTGGCTCTGGTGGTGATTGTGGCCTCACAGCTGGACAACC
TGTTCCCTCCGGAGCCAAAGCCAGAGGAGCCCCCAGCCCGGGGAGGCCTGGCTTCCACCCCACCCAAGGCCTG
GTACAAGGACATCCTGCAGCTCATTGGCTTCGCCAACCTGCCCCGGGTGGATGAGTACTGTGAGCGCGTGTGG
TGCAGGGGCACCACGGAATGCTCAGGCTGCTTCCGGAGCCGGAGCCGGGGCAAGCAGGCCAGGGGCAAGAGCT
GGGCAGGGCTGGAGCTAGGCAAGAAGATGAAGAGCCGGGTGCATGCCGAGCACAATCGGACGCCCCGGGAGGT
GGAGGCCACGTAGAAGGGGGCAGAGGAGGGGTGGTCAGGATGGGCTGGGGGGCCCACTAGCAGCCCCCAGCAT
CTCCCACCCACCCAGCTAGGGCAGAGGGGTCAGCATGTCTGTTTGCCTCTTAGAGACAGGTGTCTCTGCCCCC
ACACCGCTACTGGGGTCTAATGGAGGGGCTGGGTTCTTGAAGCCTGTTCCCTGCCCTTCTCTGTGCTCTTAGA
CCCAGCTGGAGCCAGCACCCTCTGGCTGCTGGCAGCCCCAAGGGATCTGCCATTTGTTCTCAGAGATGGCCTG
GCTTCCGCAACACATTTCCGGGTGTGCCCAGAGGCAAGAGGGTTGGGTGGTTCTTTCCCAGCCTACAGAACAA
TGGCCATTCTGAGTGACCCTCAGAGTGGGTGTGTGGGTGCGTCTAGGGGGTATCCCGGTAGGGGGCCTGCAGG
GAGCCAGAGGGTGGAAATGGCCTCTAAGCTAGCACCCCGTAAGAAGAGCCTACCTGACCGACTTGGGGAGGGA
ACACAGAGGTGTTGGGAAGGTGGAGCAACAATGCACCTCCCCTCCTGTCGCGCCGTGATATCTTGGTGGCTCC
CTGCCACTGCCCACCGCCTCTTCTCCATCTGAGAATCACGGAGAGCTGTAGATAATCTAGAGGCATAGACTGC
TAGAGCCCCCAGGATCTGGGGTGGTCAGGGCTCAGGCTTCACTTTGTAAACCAGGTGGGGGCATCTCACAGC
CTGACTTCCCTTCCCCAGGCCAGGGTTGCTGGGATGCCTGCCCCTCCTGAGAGGACCCCCTCCCCATTGTCAG
GCTCTCCATGTCCACGAGCGGGGAGGGGTGGGTTCTGGGGCATTGTTGTCCCTTGTGTCTGTGGACTAGAGAT
AGGGTGGGGGAGCTGGGGAAGGGTGCAGGCGGGAAGAGTGGGCTGTCTTTCCCAGGGTGATGCAAGCATGCCG
CAGCCCTGGAGGCTGGGAATGTGGAGGCTCTGTGAGCCCTGCAGCCC
TCAGAATCAGGGCCAGGGATGCAGAAGATTGAGAGGATATGGAGATGGATAGAGGGCAGGAGACCCTTAGGAT
AGATTGTGGGACCCAGGCAGGAACAGGTGTCCACAAGAACTCAGGATGGCATCAGTTAGCTCAGAAGCCACCT
GGAAGACCCAGTGTTTCCATCTCTGGAATCTCTGTTTTATGCTAAATGGATTTAGGAAGACTGTTTTTCTTTT
AAGGGGGAAACAAGGTAGAGAAAAGGACGAAGAAGTGTAAGTCCCGCTGATTCTCGGGGGTAAGGCTCGGATG
GCAAGGACGCGTTCTGCCTGGGCATGTAGGGGAGGTGTTTTTGCCATCACCAGTTTCTCAGGCTGGGGAGCAC
AGAGGGGAGGAGGAGGACTAAATGAAAAGTTGTTCCCAGCCTGCACATGAACACATTCATGACACACAAAACT
GGCTGGAAGGAGATAAGAGCACTGGGTTTGAGATTCCCTCCATTAAAACAACCAAGACAAAGAAAGGAGGGGA
AAAAAAGATAAAAAGCAAGCCAGGGTTCCCTGCCCTATTGAAACTCAAACCCAGACTGCCTTGGGTTTTATCT
TTCCCTTACCCCTGGCACCTCCAGAGAACTGGGACCTGAAATAGTCCCTCCGTTCTCCCCTTTGACCATGTAA
TAAATGAACCAGAAGCACTGAGATTAACCTATCAACGCCCTGAGAAGCCTTCCAGCCTGCGGTGCTGTCTGCT
GGGAGGTCAGCTGGTCAAGGCAGAGGAGGAGAGGAGGAAAGGATGGGGGCTGAAGAGCAGAAGGGAGGGGAGA
CAGAGGGGATTAAAGAGGGGAGGAGAGAGTGCAGAGCTCCAGGAAAGGGTATCAGAGCTGCAGCCAGCTCTGC
CCTCTACCCTAGGGAGGCCAGAAAGACACAAACAGCCCTCCGGGCCTTTACGCTGGACTCTGGCTTGGCAGGC
TCCAGGCAGGGTCCTCTGGGAAGTTACTCTAGAAAACGAAGGGAGGAGGAGCACAAGATCCTCAGCAACGAAC
ACCTGCACTTAGAAAAAGTGGACAGCTTCTGCCAACCACACCCTACCCATGGTACTGTATGCTATTAACTCCT
GGAAACGCCCCGTAAATGCGAGTTGTTTTTGTATTTGTGTGTTGAGATGGGCCTTGTGGTTTCTCTGTACTCA
GAGCACATTTCTTGTAATTACTATTGTTATTTTTATTGTCATGACTGCCCCTGAGCTCTGGTGAGAAAAGCTG
AATTTACAAGGAAAGGGATGAAGTTAATATTTGCATCACATAATTATATCATTACTGTGTATCTGTGTATTGT
ACTAAATGGACTGATGCTGCGCACATGAGCTGAAAATGAAGAGCCCTCCCATCC

| | | | |
|---|---|---|---|
| NOV1b, CG103945-01 | | | |
| Protein Sequence | SEQ ID NO: 4 | 782 aa | MW at 86699.9kD |

MAPSAWAICWLLGGLLLHGGSSGPSPGPSVPRLRLSYRDLLSANRSAIFLGPQGSLNLQAMYLDEYRDRLFLG
GLDALYSLRLDQAWPDPREVLWPPQPGQREECVRKGRDPLTECANFVRVLQPHNRTHLLACGTGAFQPTCALI
TVGHRGEHVLHLEPGSVESGRGRCPHEPSRPFASTFIDGELYTGLTADFLGREAMIFRSGGPRPALRSDSDQS
LLHDPRFVMAARIPENSDQDNDKVYFFFSETVPSPDGGSNHVTVSRVGRVCVNDAGGQRVLVNKWSTFLKARL
VCSVPGPGGAETHFDQLEDVFLLWPKAGKSLEVYALFSTVSAVFQGFAVCVYHMADIWEVFNGPFAHRDGPQH
QWGPYGGKVPFPRPGVCPSKMTAQPGRPFGSTKDYPDEVLQFARAHPLMFWPVRPRHGRPVLVKTHLAQQLHQ
IVVDRVEAEDGTYDVIFLGTDSGSVLKVIALQAGGSAEPEEVVLEELQVFKVPTPITEMEISVKRQMLYVGSR
LGVAQLRLHQCETYGTACAECCLARDPYCAWDGASCTHYRPSLGKRRFRRQDIRHGNPALQCLGQSQEEEAVG
LVAATMVYGTEHNSTFLECLPKSPQAAVRWLLQRPGDEGPDQVKTDERVLHTERGLLFRRLSRFDAGTYTCTT
LEHGFSQTVVRLALVVIVASQLDNLFPPEPKPEEPPARGGLASTPPKAWYKDILQLIGFANLPRVDEYCERVW
CRGTTECSGCFRSRSRGKQARGKSWAGLELGKKMKSRVHAEHNRTPREVEAT

[0358] A ClustalW comparison of the above protein sequences yields the following sequence alignment shown in Table 1B.

TABLE 1B
Comparison of the NOV1 protein sequences.

| | |
|---|---|
| NOV1a | MAPSAWAICWLLGGLLLHGGSSGPSPGPSVPRLRLSYRGAVVRKPSSTMWMETFSRYLLS |
| NOV1b | MAPSAWAICWLLGGLLLHGGSSGPSPGPSVPRLRLSYR-------------D-----LLS |
| NOV1a | ANRSAIFLGPQGSLNLQAMYLDEYRDRLFLGGLDALYSLRLDQAWPDPREVLWPPQPGQR |
| NOV1b | ANRSAIFLGPQGSLNLQAMYLDEYRDRLFLGGLDALYSLRLDQAWPDPREVLWPPQPGQR |
| NOV1a | EECVRKGRDPLTECANFVRVLQPHNRTHLLACGTGAFQPTCALITVGHRGEHVLHLEPGS |
| NOV1b | EECVRKGRDPLTECANFVRVLQPHNRTHLLACGTGAFQPTCALITVGHRGEHVLHLEPGS |
| NOV1a | VESGRGRCPHEPSRPFASTFIDGELYTGLTADFLGREAMIFRSGGPRPALRSDSDQSLLH |
| NOV1b | VESGRGRCPHEPSRPFASTFIDGELYTGLTADFLGREAMIFRSGGPRPALRSDSDQSLLH |
| NOV1a | DPRFVMAARIPENSDQDNDKVYFFFSETVPSPDGGSNHVTVSRVGRVCVNDAGGQRVLVN |
| NOV1b | DPRFVMAARIPENSDQDNDKVYFFFSETVPSPDGGSNHVTVSRVGRVCVNDAGGQRVLVN |
| NOV1a | KWSTFLKARLVCSVPGPGGAETHFDQLEDVFLLWPKAGKSLEVYALFSTVSAVFQGFAVC |
| NOV1b | KWSTFLKARLVCSVPGPGGAETHFDQLEDVFLLWPKAGKSLEVYALFSTVSAVFQGFAVC |
| NOV1a | VYHMADIWEVFNGPFAHRDGPQHQWGPYGGKVPFPRPGVCPSKMTAQPGRPFGSTKDYPD |
| NOV1b | VYHMADIWEVFNGPFAHRDGPQHQWGPYGGKVPFPRPGVCPSKMTAQPGRPFGSTKDYPD |
| NOV1a | EVLQFARAHPLMFWPVRPRHGRPVLVKTHLAQQLHQIVVDRVEAEDGTYDVIFLGTDSGS |
| NOV1b | EVLQFARAHPLMFWPVRPRHGRPVLVKTHLAQQLHQIVVDRVEAEDGTYDVIFLGTDSGS |
| NOV1a | VLKVIALQAGGSAEPEEVVLEELQVFKVPTPITEMEISVKRQMLYVGSRLGVAQLRLHQC |
| NOV1b | VLKVIALQAGGSAEPEEVVLEELQVFKVPTPITEMEISVKRQMLYVGSRLGVAQLRLHQC |
| NOV1a | ETYGTACAECCLARDPYCAWDGASCTHYRPSLGKRRFRRQDIRHGNPALQCLGQSQEEEA |
| NOV1b | ETYGTACAECCLARDPYCAWDGASCTHYRPSLGKRRFRRQDIRHGNPALQCLGQSQEEEA |
| NOV1a | VGLVAATMVYGTEHNSTFLECLPKSPQAAVRWLLQRPGDEGPDQVKTDERVLHTERGLLF |
| NOV1b | VGLVAATMVYGTEHNSTFLECLPKSPQAAVRWLLQRPGDEGPDQVKTDERVLHTERGLLF |
| NOV1a | RRLSRFDAGTYTCTTLEHGFSQTVVRLALVVIVASQLDNLFPPEPKPEEPPARGGLASTP |
| NOV1b | RRLSRFDAGTYTCTTLEHGFSQTVVRLALVVIVASQLDNLFPPEPKPEEPPARGGLASTP |
| NOV1a | PKAWYKDILQLIGFANLPRVDEYCERVWCRGTTECSGCFRSRSRGKQARGKSWAGLELGK |
| NOV1b | PKAWYKDILQLIGFANLPRVDEYCERVWCRGTTECSGCFRSRSRGKQARGKSWAGLELGK |
| NOV1a | KMKSRVHAEHNRTPREVEAT |
| NOV1b | KMKSRVHAEHNRTPREVEAT |
| NOV1a | (SEQ ID NO: 2) |
| NOV1b | (SEQ ID NO: 4) |

[0359] Further analysis of the NOV1a protein yielded the following properties shown in Table 1C.

TABLE 1C
Protein Sequence Properties NOV1a

| SignalP | Cleavage site between residues 23 and 24 | | | |
|---|---|---|---|---|
| analysis: | | | | |
| PSORT II | PSG: a new signal peptide prediction method | | | |
| analysis: | N-region: length 0; pos. chg 0; neg. chg 0 | | | |
| | H-region: length 31; peak value 9.35 | | | |
| | PSG score: 4.95 | | | |
| | GvH: von Heijne's method for signal seq. recognition | | | |
| | GvH score (threshold: −2.1): 1.50 | | | |
| | possible cleavage site: between 22 and 23 | | | |
| | >>> Seems to have a cleavable signal peptide (1 to 22) | | | |
| | ALOM: Klein et al's method for TM region allocation | | | |
| | Init position for calculation: 23 | | | |
| | Tentative number of TMS(s) for the threshold 0.5: 3 | | | |
| | Number of TMS(s) for threshold 0.5: 1 | | | |
| | INTEGRAL | Likelihood = | −2.02 | Transmembrane 345-361 |
| | PERIPHERAL | Likelihood = | 2.86 (at 150) | |
| | ALOM score: −2.02 (number of TMSs: 1) | | | |
| | MTOP: Prediction of membrane topology (Hartmann et al.) | | | |
| | Center position for calculation: 11 | | | |
| | Charge difference: 0.5 C(1.5)-N(1.0) | | | |
| | C > N: C-terminal side will be inside | | | |
| | >>>Caution: Inconsistent mtop result with signal peptide | | | |
| | >>> membrane topology: type 1a (cytoplasmic tail 362 to 800) | | | |
| | MITDISC: discrimination of mitochondrial targeting seq | | | |
| | R content: | 4 | Hyd Moment(75): | 2.13 |
| | Hyd Moment(95): | 2.46 | G content: | 7 |
| | D/E content: | 1 | S/T content: | 9 |

Score: −2.94
Gavel: prediction of cleavage sites for mitochondrial preseq
R-2 motif at 73 NRS|AI
NUCDISC: discrimination of nuclear localization signals
pat4: none
pat7: PSLGKRR (3) at 570
bipartite: none
content of basic residues: 11.4%
NLS Score: −0.22
KDEL: ER retention motif in the C-terminus: none
ER Membrane Retention Signals: none
SKL: peroxisomal targeting signal in the C-terminus: none
PTS2: 2nd peroxisomal targeting signal: none
VAC: possible vacuolar targeting motif: none
RNA-binding motif: none
Actinin-type actin-binding motif:
type 1: none
type 2: none
NMYR: N-myristoylation pattern: none
Prenylation motif: none
memYQRL: transport motif from cell surface to Golgi: none
Tyrosines in the tail: too long tail
Dileucine motif in the tail: found
LL at 633
LL at 658
checking 63 PROSITE DNA binding motifs: none
checking 71 PROSITE ribosomal protein motifs: none
checking 33 PROSITE prokaryotic DNA binding motifs: none
NNCN: Reinhardt's method for Cytoplasmic/Nuclear discrimination
Prediction: cytoplasmic
Reliability: 89
COIL: Lupas's algorithm to detect coiled-coil regions
total: 0 residues
Final Results (k = 9/23):
44.4%: endoplasmic reticulum
22.2%: Golgi
22.2%: extracellular, including cell wall
11.1%: plasma membrane
>> prediction for CG103945-02 is end (k = 9)

[0360] A search of the NOV1a protein against the Geneseq database, a proprietary database that contains sequences published in patents and patent publication, yielded several homologous proteins shown in Table 1D.

TABLE 1D
Geneseq Results for NOV1a

| | | NOV1a | Identities/ | |
|---|---|---|---|---|
| | | Residues/ | Similarities for | |
| Geneseq | Protein/Organism/Length [Patent #, | Match | the Matched | Expect |
| Identifier | Date] | Residues | Region | Value |
| AAG65620 | Novel human protein (NHP) sequence - | 1 . . . 800 | 781/800 (97%) | 0.0 |
| | Homo sapiens, 782 aa. | 1 . . . 782 | 781/800 (97%) | |
| | [WO200170806-A2, 27 SEP. 2001] | | | |
| AAG65619 | Novel human protein (NHP) sequence - | 1 . . . 800 | 781/800 (97%) | 0.0 |
| | Homo sapiens, 875 aa. | 94 . . . 875 | 781/800 (97%) | |
| | [WO200170806-A2, 27 SEP. 2001] | | | |
| AAB23609 | Human secreted protein SEQ ID NO: | 1 . . . 800 | 781/800 (97%) | 0.0 |
| | 18 - Homo sapiens, 782 aa. | 1 . . . 782 | 781/800 (97%) | |
| | [WO200049134-A1, 24 AUG. 2000] | | | |
| AAB23636 | Human secreted protein SEQ ID NO: | 1 . . . 800 | 781/803 (97%) | 0.0 |
| | 92 - Homo sapiens, 785 aa. | 1 . . . 785 | 781/803 (97%) | |
| | [WO200049134-A1, 24 AUG. 2000] | | | |
| AAG78481 | Human ZSMF-16 - Homo sapiens, | 1 . . . 800 | 778/800 (97%) | 0.0 |
| | 779 aa. [US2001049432-A1, | 1 . . . 779 | 779/800 (97%) | |
| | 06 DEC. 2001] | | | |

[0361] In a BLAST search of public sequence databases, the NOV1a protein was found to have homology to the proteins shown in the BLASTP data in Table 1E.

TABLE 1E
Public BLASTP Results for NOV1a

| | | NOV1a | Identities/ | |
|---|---|---|---|---|
| Protein | | Residues/ | Similarities for | |
| Accession | | Match | the Matched | Expect |
| Number | Protein/Organism/Length | Residues | Portion | Value |
| Q9NS98 | Semaphorin sem2 (FLJ00014 | 1 . . . 800 | 781/800 (97%) | 0.0 |
| | protein) - Homo sapiens (Human), | 1 . . . 782 | 781/800 (97%) | |
| | 782 aa. | | | |
| CAC42673 | Sequence 1 from Patent WO0140278 - | 1 . . . 800 | 778/800 (97%) | 0.0 |
| | Homo sapiens (Human), 779 aa. | 1 . . . 779 | 779/800 (97%) | |
| Q9QX23 | Semaphorin M-SemaK - Mus | 1 . . . 795 | 399/805 (49%) | 0.0 |
| | musculus (Mouse), 775 aa. | 1 . . . 770 | 525/805 (64%) | |
| P70275 | Semaphorin 3E precursor | 1 . . . 795 | 398/805 (49%) | 0.0 |
| | (Semaphorin H) (Sema H) - Mus | 1 . . . 770 | 524/805 (64%) | |
| | musculus (Mouse), 775 aa. | | | |
| O42237 | Semaphorin 3E precursor | 1 . . . 797 | 398/806 (49%) | 0.0 |
| | (Collapsin-5) (COLL-5) - Gallus | 5 . . . 782 | 519/806 (64%) | |
| | gallus (Chicken), 785 aa. | | | |

[0362] PFam analysis predicts that the NOV1a protein contains the domains shown in the Table 1F.

TABLE 1F
Domain Analysis of NOV1a

| | | Identities/ | |
|---|---|---|---|
| Pfam | | Similarities | Expect |
| Domain | NOV1a Match Region | for the Matched Region | Value |
| Sema | 76 . . . 521 | 217/497 (44%) | 1.3e−176 |
| | | 360/497 (72%) | |
| PSI | 539 . . . 622 | 14/101 (14%) | 0.76 |
| | | 56/101 (55%) | |
| ig | 614 . . . 675 | 15/66 (23%) | 0.0061 |
| | | 45/66 (68%) | |

### Example 2

[0363] The NOV2 clone was analyzed, and the nucleotide and encoded polypeptide sequences are shown in Table 2A.

TABLE 2A
NOV2 Sequence Analysis

| | | |
|---|---|---|
| NOV2a, CG106951-01 | SEQ ID NO: 5 | 6408 bp |
| DNA Sequence | ORF Start: ATG at 1400 | ORF Stop: TGA at 5456 |

CCTGGGACTCTGGGAGAATGGTCCAGAGCTCATTGTCCTTGTTGATAAAATGATAGATTTGGACTCAATATCC
CATGCTGCCTCTTCCAACTTGATTTTTACCCCAGACTGGGCTACCAGACTGGTATGCCCACACATGCCCGTTT
CCTTTCTTTTCTTCTCTGCATCTCTGCCTTTGTGTCCAGAGCGTGTTTTCCCTTTGCAAGTTTCTCTCCATTC
TGCACATTATGAGTTTCAGCATTTCTGTTGCCCTAGAAAGTCTATCTTTGAGATCTTGCACTGTTTCTCTTTT
TACAGTGTCTCATAAACTCCCTTCTTGGATTCAGAACCACCCTTTCTTTCCCATTATCCTGTCAAACTGCTTC
TTGCCATGGTCCAGGGGTAGGAGGATGGCAGGCAGGAGGTGCTTCTCTGGGGCTCTTAGTGTCTCAATTCTTC
TGCTTTATCTGGGTTTTCCTTTACCCAGAATTTTATTATGTAAAATGCTTCACTCAGACTTTGTTCTAATTAT
CCAATTTTTGGCATACTCTAGAAAGTCTTTTGATATTTTCCTTCCTCCAACTTATCTATTTTTATTTCATAGT
TCTCTTTGGTTATCTCTTAGAATCACACTTTCCTGGTTTTAATTTTTCAAATCCTTTGTCTTTCTCACTCGTT
CTTAGGTCACCTTTTTTTACATTTTCAAATATATTTTTTGTTCAGCAGAGGGCTCCCTTCCCATCCCTCTTGC
AGCCCGGGCAGCTAGGATTTGAAGCTTGCCCCTTGAATCTTTCTCTCCCGCCTTCTAGCCATCAGAAACACTA
GATCACTTAAACTTGTAAACAATTCGGCCTCGCTCCTTGTGATTGCGCTAAACCTTCCGTCCTCAGCTGAGAA
CGCTCCACCACCTCCCCGGATCGCTCATCTCTTGGCTGCCCTCCCACTGTTCCTGATGTTATTTTACTCCCCG
TATCCCCTACTCGTTCTTCACAATTCTGTAGGGTGCGTATTACTAACCCCAGTTTACAGCTGAGGAAACTGAG
GCTTGGAGAGGTTCGCTCGGTATCGTACAGTTTGCAAGGTTAACCCTAATCCGGCCAGTTCTGGCTTTCCAGC
CCAGCCCAGCAGCCTAGCCTCCCTCTCTGCCGCTGCAGGTTATAACGGCTCTCCCCCGTTTTACACGAGGTCC
CTTCCCCTTCAAATCCACAGGCAGGAAGATCGTTCCGAACTGACGGGGCTGGGGAATGTGGGAGTCCGGAGTG
GGGTTTGGGGGAGCTTCCTCAGGCCCTGAGTGTTGGGGTGGGCAGGCCGCGCCGATGGCCCTCGGGGATGTCA
CATTCGAGATGGGGTGACCGAGAACGGCAAGGCGGGATGTGGCAAACGGCGGCAAGTGCTCGGAGTCCTAGGT
CTTGCCGCCGGAATGCCGGCCGGGGAAGGGGCTTCGGCCCACCGGGCTGGTCACCACACTCGGCAGGCCCGGG
GCGGGAGTCGGCCGAGCAGCCGCGGGATGCAGGGCGCCCCCTCGCGCTCCTCCGCGCGCCTCGAGGCTGGCGG
GTGCAGCGCCCGCCGCGGCAGGTCTGCTCCAGCCCCCTCCTCTTTTTCGCTCCCGCTCCCCTCCTTCTCTCCC
TTTGCTTGCAACTCCTCCCCCACCGCCCCCTCCCTCCTTCTGCTCCCGCGGTCTCCTCCTCCCTGCTCTCTCC
GAGCGCCGGGTCGGGAGCTAGTTGGAGCGCGGGGGTTGGTGCCAGAGCCCAGCTCCGCCGAGCCGGGCGGGTC
GGCAGCGCATCCAGCGGCTGCTGGGAGCCCGAGCGCAGCGGGCGCGGGCCCGGGTGGGGACTGCACCGGAGCG
CTGAGAGCTGGAGGCCGTTCCTGCGCGGCCGCCCCATTCCCAGACCGGCCGCCAGCCCATCTGGTTAGCTCCC
GCCGCTCCGCGCCGCCCGGGAGTCGGGAGCCGCGGGGAACCGGGCACCTGCACCCGCCTCTGGGAGTGAGTGG
TTCCAGCTGGTGCCTGGCCTGTGTCTCTTGGATGCCCTGTGGCTTCAGTCCGTCTCCTGTTGCCCACCACCTC
GTCCCTGGGCCGCCTGATACCCCAGCCCAACAGCTAAGGTGTGGATGGACAGTAGGGGGCTGGCTTCTCTCAC
TGGTCAGGGGTCTTCTCCCCTGTCTGCCTCCCGGAGCTAGGACTGCAGAGGGGCCTATCATGGTGCTTGCAGG
CCCCCTGGCTGTCTCGCTGTTGCTGCCCAGCCTCACACTGCTGGTGTCCCACCTCTCCAGCTCCCAGGATGTC
TCCAGTGAGCCCAGCAGTGAGCAGCAGCTGTGCGCCCTTAGCAAGCACCCCACCGTGGCCTTTGAAGACCTGC
AGCCGTGGGTCTCTAACTTCACCTACCCTGGAGCCCGGGATTTCTCCCAGCTGGCTTTGGACCCCTCCGGGAA
CCAGCTCATCGTGGGAGCCAGGAACTACCTCTTCAGACTCAGCCTTGCCAATGTCTCTCTTCTTCAGGCCACA
GAGTGGGCCTCCAGTGAGGACACGCGCCGCTCCTGCCAAAGCAAAGGGAAGACTGAGGAGGAGTGTCAGAACT
ACGTGCGAGTCCTGATCGTCGCCGGCCGGAAGGTGTTCATGTGTGGAACCAATGCCTTTTCCCCCATGTGCAC
CAGCAGACAGGTGGGGAACCTCAGCCGGACTACTGAGAAGATCAATGGTGTGGCCCGCTGCCCCTATGACCCA
CGCCACAACTCCACAGCTGTCATCTCCTCCCAGGGGGAGCTCTATGCAGCCACGGTCATCGACTTCTCAGGTC
GGGACCCTGCCATCTACCGCAGCCTGGGCAGTGGGCCACCGCTTCGCACTGCCCAATATAACTCCAAGTGGCT
TAATGAGCCAAACTTCGTGGCAGCCTATGATATTGGGCTGTTTGCATACTTCTTCCTGCGGGAGAACGCAGTG
GAGCACGACTGTGGACGCACCGTGTACTCTCGCGTGGCCCGCGTGTGCAAGAATGACGTGGGGGGCCGATTCC
TGCTGGAGGACACATGGACCACATTCATCAAGGCCCGGCTCAACTGCTCCCGCCCGGGCGAGGTCCCCTTCTA
CTATAACGAGCTGCAGAGTGCCTTCCACTTGCCAGAGCAGGACCTCATCTATGGAGTTTTCACAACCAACGTA
AACAGCATCGCGGCTTCTGCTGTCTGCGCCTTCAACCTCAGTGCTATCTCCCAGGCTTTCAATGGCCCATTTC
GCTACCAGGAGAACCCCAGGGCTGCCTGGCTCCCCATAGCCAACCCCATCCCCAATTTCCAGTGTGGCACCCT
GCCTGAGACCGGTCCCAACGAGAACCTGACGGAGCGCAGCCTGCAGGACGCGCAGCGCCTCTTCCTGATGAGC
GAGGCCGTGCAGCCGGTGACACCCGAGCCCTGTGTCACCCAGGACAGCGTGCGCTTCTCACACCTCGTGGTGG
ACCTGGTGCAGGCTAAAGACACGCTCTACCATGTACTCTACATTGGCACCGAGTCGGGCACCATCCTGAAGGC
GCTGTCCACGGCGAGCCGCAGCCTCCACGGCTGCTACCTGGAGGAGCTGCACGTGCTGCCCCCCGGGCGCCGC
GAGCCCCTGCGCAGCCTGCGCATCCTGCACAGCGCCCGCGCGCTCTTCGTGGGGCTGAGAGACGGCGTCCTGC
GGGTCCCACTGGAGAGGTGCGCCGCCTACCGCAGCCAGGGGGCATGCCTGGGGGCCCGGGACCCGTACTGTGG
CTGGGACGGGAAGCAGCAACGTTGCAGCACACTCGAGGACAGCTCCAACATGAGCCTCTGGACCCAGAACATC
ACCGCCTGTCCTGTGCGGAATGTGACACGGGATGGGGGCTTCGGCCCATGGTCACCATGGCAACCATGTGAGC
ACTTGGATGGGGACAACTCAGGCTCTTGCCTGTGTCGAGCTCGATCCTGTGATTCCCCTCGACCCCGCTGTGG
GGGCCTTGACTGCCTGGGGCCAGCCATCCACATCGCCAACTGCTCCAGGAATGGGGCGTGGACCCCGTGGTCA
TCGTGGGCGCTGTGCAGCACGTCCTGTGGCATCGGCTTCCAGGTCCGCCAGCGAAGTTGCAGCAACCCTGCTC
CCCGCCACGGGGGCCGCATCTGCGTGGGCAAGAGCCGGGAGGAACGGTTCTGTAATGAGAACACGCCTTGCCC
GGTGCCCATCTTCTGGGCTTCCTGGGGCTCCTGGAGCAAGTGCAGCAGCAACTGTGGAGGGGGCATGCAGTCG
CGGCGTCGGGCCTGCGAGAACGGCAACTCCTGCCTGGGCTGCGGCGTGGAGTTCAAGACGTGCAACCCCGAGG
GCTGCCCCGAAGTGCGGCGCAACACCCCCTGGACGCCGTGGCTGCCCGTGAACGTGACGCAGGGCGGGGCACG
GCAGGAGCAGCGGTTCCGCTTCACCTGCCGCGCGCCCCTTGCAGACCCGCACGGCCTGCAGTTCGGCAGGAGA
AGGACCGAGACGAGGACCTGTCCCGCGGACGGCTCCGGCTCCTGCGACACCGACGCCCTGGTGGAGGACCTCC
TGCGCAGCGGGAGCACCTCCCCGCACACGGTGAGCGGGGGCTGGGCCGCCTGGGGCCCGTGGTCGTCCTGCTC
CCGGGACTGCGAGCTGGGCTTCCGCGTCCGCAAGAGAACGTGCACTAACCCGGAGCCCCGCAACGGGGGCCTG
CCCTGCGTCGGCGATGCTGCCGAGTACCAGGACTGCAACCCCCAGGCTTGCCCAGTTCGGGGTGCTTGGTCCT
GCTGGACCTCATGGTCTCCATGCTCAGCTTCCTGTGGTGGGGGTCACTATCAACGCACCCGTTCCTGCACCAG
CCCCGCACCCTCCCCAGGTGAGGACATCTGTCTCGGGCTGCACACGGAGGAGGCACTATGTGCCACACAGGCC
TGCCCAGAAGGCTGGTCGCCCTGGTCTGAGTGGAGTAAGTGCACTGACGACGGAGCCCAGAGCCGAAGCCGGC
ACTGTGAGGAGCTCCTCCCAGGGTCCAGCGCCTGTGCTGGAAACAGCAGCCAGAGCCGCCCCTGCCCCTACAG
CGAGATTCCCGTCATCCTGCCAGCCTCCAGCATGGAGGAGGCCACCGGCTGTGCAGGGTTCAATCTCATCCAC
TTGGTGGCCACGGGCATCTCCTGCTTCTTGGGCTCTGGGCTCCTGACCCTAGCAGTGTACCTGTCTTGCCAGC
ACTGCCAGCGTCAGTCCCAGGAGTCCACACTGGTCCATCCTGCCACCCCCAACCATTTGCACTACAAGGGCGG
AGGCACCCCGAAGAATGAAAAGTACACACCCATGGAATTCAAGACCCTGAACAAGAATAACTTGATCCCTGAT
GACAGAGCCAACTTCTACCCATTGCAGCAGACCAATGTGTACACGACTACTTACTACCCAAGCCCCCTGAACA
AACACAGCTTCCGGCCCGAGGCCTCACCTGGACAACGGTGCTTCCCCAACAGCTGATACCGCCGTCCTGGGGA
CTTGGGCTTCTTGCCTTCATAAGGCACAGAGCAGATGGAGATGGGACAGTGGAGCCAGTTTGGTTTTCTCCCT
CTGCACTAGGCCAAGAACTTGCTGCCTTGCCTGTGGGGGGTCCCATCCGGCTTCAGAGAGCTCTGGCTGGCAT
TGACCATGGGGGAAAGGGCTGGTTTCAGGCTGACATATGGCCGCAGGTCCAGTTCAGCCCAGGTCTCTCATGG
TTATCTTCCAACCCACTGTCACGCTGACACTATGCTGCCATGCCTGGGCTGTGGACCTACTGGGCATTTGAGG
AACTGGAGAATGGAGATGGCAAGAGGGCAGGCTTTTAAGTTTGGGTTGGAGACAACTTCCTGTGGCCCCCACA
AGCTGAGTCTGGCCTTCTCCAGCTGGCCCCAAAAAAGGCCTTTGCTACATCCTGATTATCTCTGAAAGTAATC
AATCAAGTGGCTCCAGTAGCTCTGGATTTTCTGCCAGGGCTGGGCCATTGTGGTGCTGCCCCAGTATGACATG
GGACCAAGGCCAGCGCAGGTTATCCACCTCTGCCTGGAAGTCTATACTCTACCCAGGGCATCCCTCTGGTCAG
AGGCAGTGAGTACTGGGAACTGGAGGCTGACCTGTGCTTAGAAGTCCTTTAATCTGGGCTGGTACAGGCCTCA
GCCTTGCCCTCAATGCACGAAAGGTGGCCCAGGAGAGAGGATCAATGCCACAGGAGGCAGAAGTCTGGCCTCT
GTGCCTCTATGGAGACTATCTTCCAGTTGCTGCTCAACAGAGTTGTTGGCTGAGACCTGCTTGGGAGTCTCTG
CTGGCCCTTCATCTGTTCAGGAACACACACACACACACACTCACACACGCACACACAATCACAATTTGCTACA
GCAACAAAAAAGACATTGGGCTGTGGCATTATTAATTAAAGATGATATCCAGTCTCC

| | | | |
|---|---|---|---|
| NOV2a, CG106951-01 | | | |
| Protein Sequence | SEQ ID NO: 6 | 1352 aa | MW at 145674.1kD |

[sequence omitted]

| | | |
|---|---|---|
| NOV2b, CG106951-04 | SEQ ID NO: 7 | 3631 bp |
| DNA Sequence | ORF Start: ATG at 154 | ORF Stop: TGA at 3544 |

GCGGCCGCCCCATTCCCAGACCGGCCGCCAGCCCATCTGGTTAGCTCCCGCCGCTCCGCGCCGCCCGGGAGTC
GGGAGCCGCGGGGAACCGGGCACCTGCACCCGCCTCTGGGAGTGAGTGGTTCCAGCTGGTGCCTGGCCTGTGT
CTCTTGGATGCCCTGTGGCTTCAGTCCGTCTCCTGTTGCCCACCACCTCGTCCCTGGGCCGCCTGATACCCCA
GCCCAACAGCTAAGGTGTGGATGGACAGTAGGGGGCTGGCTTCTCTCACTGGTCAGGGGTCTTCTCCCCTGTC
TGCCTCCCGGAGCTAGGACTGCAGAGGGGCCTATCATGGTGCTTGCAGGCCCCCTGGCTGTCTCGCTGTTGCT
GCCCAGCCTCACACTGCTGGTGTCCCACCTCTCCAGCTCCCAGGATGTCTCCAGTGAGCCCAGCAGTGAGCAG
CAGCTGTGCGCCCTTAGCAAGCACCCCACCGTGGCCTTTGAAGACCTGCAGCCGTGGGTCTCTAACTTCACCT
ACCCTGGAGCCCGGGATTTCTCCCAGCTGGCTTTGGACCCCTCCGGGAACCAGCTCATCGTGGGAGCCAGGAA
CTACCTCTTCAGACTCAGCCTTGCCAATGTCTCTCTTCTTCAGGCCACAGAGTGGGCCTCCAGTGAGGACACG
CGCCGCTCCTGCCAAAGCAAAGGGAAGACTGAGGAGGAGTGTCAGAACTACGTGCGAGTCCTGATCGTCGCCG
GCCGGAAGGTGTTCATGTGTGGAACCAATGCCTTTTCCCCCATGTGCACCAGCAGACAGGTGGGGAACCTCAG
CCGGACTACTGAGAAGATCAATGGTGTGGCCCGCTGCCCCTATGACCCACGCCACAACTCCACAGCTGTCATC
TCCTCCCAGGGGGAGCTCTATGCAGCCACGGTCATCGACTTCTCAGGTCGGGACCCTGCCATCTACCGCAGCC
TGGGCAGTGGGCCACCGCTTCGCACTGCCCAATATAACTCCAAGTGGCTTAATGAGCCAAACTTCGTGGCAGC
CTATGATATTGGGCTGTTTGCATACTTCTTCCTGCGGGAGAACGCAGTGGAGCACGACTGTGGACGCACCGTG
TACTCTCGCGTGGCCCGCGTGTGCAAGAATGACGTGGGGGGCCGATTCCTGCTGGAGGACACATGGACCACAT
TCATGAAGGCCCGGCTCAACTGCTCCCGCCCGGGCGAGGTCCCCTTCTACTATAACGAGCTGCAGAGTGCCTT
CCACTTGCCAGAGCAGGACCTCATCTATGGAGTTTTCACAACCAACGTAAACAGCATCGCGGCTTCTGCTGTC
TGCGCCTTCAACCTCAGTGCTATCTCCCAGGCTTTCAATGGCCCATTTCGCTACCAGGAGAACCCCAGGGCTG
CCTGGCTCCCCATAGCCAACCCCATCCCCAATTTCCAGTGTGGCACCCTGCCTGAGACCGGTCCCAACGAGAA
CCTGACGGAGCGCAGCCTGCAGGACGCGCAGCGCCTCTTCCTGATGAGCGAGGCCGTGCAGCCGGTGACACCC
GAGCCCTGTGTCACCCAGGACAGCGTGCGCTTCTCACACCTCGTGGTGGACCTGGTGCAGGCTAAAGACACGC
TCTACCATGTACTCTACATTGGCACCGAGTCGGGCACCATCCTGAAGGCGCTGTCCACGGCGAGCCGCAGCCT
CCACGGCTGCTACCTGGAGGAGCTGCACGTGCTGCCCCCCGGGCGCCGCGAGCCCCTGCGCAGCCTGCGCATC
CTGCACAGCGCCCGCGCGCTCTTCGTGGGGCTGAGAGACGGCGTCCTGCGGGTCCCACTGGAGAGGTGCGCCG
CCTACCGCAGCCAGGGGGCATGCCTGGGGGCCCGGGACCCGTACTGTGGCTGGGACGGGAAGCAGCAACGTTG
CAGCACACTCGAGGACAGCTCCAACATGAGCCTCTGGACCCAGAACATCACCGCCTGTCCTGTGCGGAATGTG
ACACGGGATGGGGGCTTCGGCCCATGGTCACCATGGCAACCATGTGAGCACTTGGATGGGGACAACTCAGGCT
CTTGCCTGTGTCGAGCTCGATCCTGTGATTCCCCTCGACCCCGCTGTGGGGGCCTTGACTGCCTGGGGCCAGC
CATCCACATCGCCAACTGCTCCAGGAATGGGGCGTGGACCCCGTGGTCATCGTGGGCGCTGTGCAGCACGTCC
TGTGGCATCGGCTTCCAGGTCCGCCAGCGAAGTTGCAGCAACCCTGCTCCCCGCCACGGGGGCCGCATCTGCG
TGGGCAAGAGCCGGGAGGAACGGTTCTGTAATGAGAACACGCCTTGCCCGGTGCCCATCTTCTGGGCTTCCTG
GGGCTCCTGGAGCAAGTGCAGCAGCAACTGTGGAGGGGGCATGCAGTCGCGGCGTCGGGCCTGCGAGAACGGC
AACTCCTGCCTGGGCTGCGGCGTGGAGTTCAAGACGTGCAACCCCGAGGGCTGCCCCGAAGTGCGGCGCAACA
CCCCCTGGACGCCGTGGCTGCCCGTGAACGTGACGCAGGGCGGGGCACGGCAGGAGCAGCGGTTCCGCTTCAC
CTGCCGCGCGCCCCTTGCAGACCCGCACGGCCTGCAGTTCGGCAGGAGAAGGACCGAGACGAGGACCTGTCCC
GCGGACGGCTCCGGCTCCTGCGACACCGACGCCCTGGTGGAGGACCTCCTGCGCAGCGGGAGCACCTCCCCGC
ACACGGTGAGCGGGGGCTGGGCCGCCTGGGGCCCGTGGTCGTCCTGCTCCCGGGACTGCGAGCTGGGCTTCCG
CGTCCGCAAGAGAACGTGCACTAACCCGGAGCCCCGCAACGGGGGCCTGCCCTGCGTGGGCGATGCTGCCGAG
TACCAGGACTGCAACCCCCAGGCTTGCCCAGTTCGGGGTGCTTGGTCCTGCTGGACCTCATGGTCTCCATGCT
CAGCTTCCTGTGGTGGGGGTCACTATCAACGCACCCGTTCCTGCACCAGCCCCGCACCCTCCCCAGAAGGCTG
GTCGCCCTGGTCTGAGTGGAGTAAGTGCACTGACGACGGAGCCCAGAGCCGAAGCCGGCACTGTGAGGAGCTC
CTCCCAGGGTCCAGCGCCTGTGCTGGAAACAGCAGCCAGAGCCGCCCCTGCCCCTACAGCGAGATTCCCGTCA
TCCTGCCAGCCTCCAGCATGGAGGAGGCCACCGGCTGTGCAGGGTTCAATCTCATCCACTTGGTGGCCACGGG
CATCTCCTGCTTCTTGGGCTCTGGGCTCCTGACCCTAGCAGTGTACCTGTCTTGCCAGCACTGCCAGCGTCAG
TCCCAGGAGTCCACACTGGTCCATCCTGCCACCCCCAACCATTTGCACTACAAGGGCGGAGGCACCCCGAAGA
ATGAAAAGTACACACCCATGGAATTCAAGACCCTGAACAAGAATAACTTGATCCCTGATGACAGAGCCAACTT
CTACCCATTGCAGCAGACCAATGTGTACACGACTACTTACTACCCAAGCCCCCTGAACAAACACAGCTTCCGG
CCCGAGGCCTCACCTGGACAACGGTGCTTCCCCAACAGCTGATACCGCCGTCCTGGGGACTTGGGCTTCTTGC
CTTCATAAGGCACAGAGCAGATGGAGATGGGACAGTGGAGCCAGTTTGGTTTCT

| | | | |
|---|---|---|---|
| NOV2b, CG106951-04 | | | |
| Protein Sequence | SEQ ID NO: 8 | 1130 aa | MW at 123700.9kD |

MPCGFSPSPVAHHLVPGPPDTPAQQLRCGWTVGGWLLSLVRGLLPCLPPGARTAEGPIMVLAGPLAVSLLLPS
LTLLVSHLSSSQDVSSEPSSEQQLCALSKHPTVAFEDLQPWVSNFTYPGARDFSQLALDPSGNQLIVGARNYL
FRLSLANVSLLQATEWASSEDTRRSCQSKGKTEEECQNYVRVLIVAGRKVFMCGTNAFSPMCTSRQVGNLSRT
TEKINGVARCPYDPRHNSTAVISSQGELYAATVIDFSGRDPAIYRSLGSGPPLRTAQYNSKWLNEPNFVAAYD
IGLFAYFFLRENAVEHDCGRTVYSRVARVCKNDVGGRFLLEDTWTTFMKARLNCSRPGEVPFYYNELQSAFHL
PEQDLIYGVFTTNVNSIAASAVCAFNLSAISQAFNGPFRYQENPRAAWLPIANPIPNFQCGTLPETGPNENLT
ERSLQDAQRLFLMSEAVQPVTPEPCVTQDSVRFSHLVVDLVQAKDTLYHVLYIGTESGTILKALSTASRSLHG
CYLEELHVLPPGRREPLRSLRILHSARALFVGLRDGVLRVPLERCAAYRSQGACLGARDPYCGWDGKQQRCST
LEDSSNMSLWTQNITACPVRNVTRDGGFGPWSPWQPCEHLDGDNSGSCLCRARSCDSPRPRCGGLDCLGPAIH
IANCSRNGAWTPWSSWALCSTSCGIGFQVRQRSCSNPAPRHGGRICVGKSREERFCNENTPCPVPIFWASWGS
WSKCSSNCGGGMQSRRRACENGNSCLGCGVEFKTCNPEGCPEVRRNTPWTPWLPVNVTQGGARQEQRFRFTCR
APLADPHGLQFGRRRTETRTCPADGSGSCDTDALVEDLLRSGSTSPHTVSGGWAAWGPWSSCSRDCELGFRVR
KRTCTNPEPRNGGLPCVGDAAEYQDCNPQACPVRGAWSCWTSWSPCSASCGGGHYQRTRSCTSPAPSPEGWSP
WSEWSKCTDDGAQSRSRHCEELLPGSSACAGNSSQSRPCPYSEIPVILPASSMEEATGCAGFNLIHLVATGIS
CFLGSGLLTLAVYLSCQHCQRQSQESTLVHPATPNHLHYKGGGTPKNEKYTPMEFKTLNKNNLIPDDRANFYP
LQQTNVYTTTYYPSPLNKHSFRPEASPGQRCFPNS

| | | |
|---|---|---|
| NOV2c, 209829549 | SEQ ID NO: 9 | 1203 bp |
| DNA Sequence | ORF Start: at 1 | ORF Stop: end of sequence |

GGATCCGGCCCATGGTCACCATGGCAACCATGTGAGCACTTGGATGGGGACAACTCAGGCTCTTGCCTGTGTC
GAGCTCGATCCTGTGATTCCCCTCGACCCCGCTGTGGGGGCCTTGACTGCCTGGGGCCAGCCATCCACATCGC
CAACTGCTCCAGGAATGGGGCGTGGACCCCGTGGTCATCGTGGGCGCTGTGCAGCACGTCCTGTGGCATCGGC
TTCCAGGTCCGCCAGCGAAGTTGCAGCAACCCTGCTCCCCGCCACGGGGGCCGCATCTGCGTGGGCAAGAGCC
GGGAGGAACGGTTCTGTAATGAGAACACGCCTTGCCCGGTGCCCATCTTCTGGGCTTCCTGGGGCTCCTGGAG
CAAGTGCAGCAGCAACTGTGGAGGGGGCATGCGGTCGCGGCGTCGGGCCTGCGAGAACGGCAACTCCTGCCTG
GGCTGCGGCGTGGAGTTCAAGACGTGCAACCCCGAGGGCTGCCCCGAAGTGCGGCGCAACACCCCCTGGACGC
CGTGGCTGCCCGTGAACGTGACGCAGGGCGGGGCACGGCAGGAGCAGCGGTTCCGCTTCACCTGCCGCGCGCC
CCTTGCAGACCCGCACGGCCTGCAGTTCGGCAGGAGAAGGACCGAGACGAGGACCTGTCCCGCGGACGGCTCC
GGCTCCTGCGACACCGACGCCCTGGTGGAGGACCTCCTGCGCAGCGGGAGCACCTCCCCGCACACGGTGAGCG
GGGGCTGGGCCGCCTGGGGCCCGTGGTCGTCCTGCTCCCGGGACTGCGAGCTGGGCTTCCGCGTCCGCAAGAG
AACGTGCACTAACCCGGAGCCCCGCAACGGGGGCCTGCCCTGCGTGGGCGATGCTGCCGAGTACCAGGACTGC
AACCCCCAGGCTTGCCCAGTTCGGGGTGCTTGGTCCTGCTGGACCTCATGGTCTCCATGCTCAGCTTCCTGTG
GTGGGGGTCACTATCAACGCACCCGTTCCTGCACCAGCCCCGCACCCTCCCCAGGTGAGGACATCTGTCTCGG
GCTGCACACGGAGGAGGCACTATGTGCCACACAGGCCTGCCCAGAAGGCTGGTCGCCCTGGTCTGAGTGGAGT
AAGTGCACTGACGACGGAGCCCAGAGCCGAAGCCGGCACTGTGAGGAGCTCCTCCCAGGGTCCAGCGCCTGTG
CTGGAAACAGCAGCCAGAGCCGCCCCTGCGTCGAC

| | | | |
|---|---|---|---|
| NOV2c, 209829549 | | | |
| Protein Sequence | SEQ ID NO: 10 | 401 aa | MW at 43284.5kD |

GSGPWSPWQPCEHLDGDNSGSCLCRARSCDSPRPRCGGLDCLGPAIHIANCSRNGAWTPWSSWALCSTSCGIG
FQVRQRSCSNPAPRHGGRICVGKSREERFCNENTPCPVPIFWASWGSWSKCSSNCGGGMRSRRRACENGNSCL
GCGVEFKTCNPEGCPEVRRNTPWTPWLPVNVTQGGARQEQRFRFTCRAPLADPHGLQFGRRRTETRTCPADGS
GSCDTDALVEDLLRSGSTSPHTVSGGWAAWGPWSSCSRDCELGFRVRKRTCTNPEPRNGGLPCVGDAAEYQDC
NPQACPVRGAWSCWTSWSPCSASCGGGHYQRTRSCTSPAPSPGEDICLGLHTEEALCATQACPEGWSPWSEWS
KCTDDGAQSRSRHCEELLPGSSACAGNSSQSRPCVD

| | | |
|---|---|---|
| NOV2d, 209829553 | SEQ ID NO: 11 | 1203 bp |
| DNA Sequence | ORF Start: at 1 | ORF Stop: end of sequence |

GGATCCGGCCCATGGTCACCATGGCAACCATGTGAGCACTTGGATGGGGACAACTCAGGCTCTTGCCTGTGTC
GAGCTCGATCCTGTGATTCCCCTCGACCCCGCTGTGGGGGCCTTGACTGCCTGGGGCCAGCCATCCACATCGC
CAACTGCTCCAGGAATGGGGCGTGGACCCCGTGGTCATCGTGGGCGCTGTGCAGCACGTCCTGTGGCATCGGC
TTCCAGGTCCGCCAGCGAAGTTGCAGCAACCCTGCTCCCCGCCACGGGGGCCGCATCTGCGTGGGCAAGAGCC
GGGAGGAACGGTTCTGTAATGAGAACACGCCTTGCCCGGTGCCCATCTTCTGGGCTTCCTGGGGCTCCTGGAG
CAAGTGCAGCAGCAACTGTGGAGGGGGCATGCAGTCGCGGCGTCGGGCCTGCGAGAACGGCAACTCCTGCCTG
GGCTGCGGCGTGGAGTTCAAGACGTGCAACCCCGAGGGCTGCCCCGAAGTGCGGCGCAACACCCCCTGGACGC
CGTGGCTGCCCGTGAACGTGACGCAGGGCGGGGCACGGCAGGAGCAGCGGTTCCGCTTCACCTGCCGCGCGCC
CCTTGCAGACCCGCACGGCCTGCAGTTCGGCAGGAGAAGGACCGAGACGAGGACCTGTCCCGCGGACGGCTCC
GGCTCCTGCGACACCGACGCCCTGGTGGAGGACCTCCTGCGCAGCGGGAGCACCTCCCCGCACACGGTGAGCG
GGGGCTGGGCCGCCTGGGGCCCGTGGTCGTCCTGCTCCCGGGACTGCGAGCTGGGCTTCCGCGTCCGCAAGAG
AACGTGCACTAACCCGGAGTCCCGCAACGGGGGCCTGCCCTGCGTGGGCGATGCTGCCGAGTACCAGGACTGC
AACCCCCAGGCTTGCCCAGTTCGGGGTGCTTGGTCCTGCTGGACCTCATGGTCTCCATGCTCAGCTTCCTGTG
GTGGGGGTCACTATCAACGCACCCGTTCCTGCACCAGCCCCGCACCCTCCCCAGGTGAGGACATCTGTCTCGG
GCTGCACACGGAGGAGGCACTATGTGCCACACAGGCCTGCCCAGAAGGCTGGTCGCCCTGGTCTGAGTGGAGT
AAGTGCACTGACGACGGAGCCCAGAGCCGAAGCCGGCACTGTGAGGAGCTCCTCCCAGGGTCCAGCGCCTGTG
CTGGAAACAGCAGCCAGAGCCGCCCCTGCGTCGAC

| | | | |
|---|---|---|---|
| NOV2d, 209829553 | | | |
| Protein Sequence | SEQ ID NO: 12 | 401 aa | MW at 43246.4kD |

GSGPWSPWQPCEHLDGDNSGSCLCRARSCDSPRPRCGGLDCLGPAIHIANCSRNGAWTPWSSWALCSTSCGIG
FQVRQRSCSNPAPRHGGRICVGKSREERFCNENTPCPVPIFWASWGSWSKCSSNCGGGMQSRRRACENGNSCL
GCGVEFKTCNPEGCPEVRRNTPWTPWLPVNVTQGGARQEQRFRFTCRAPLADPHGLQFGRRRTETRTCPADGS
GSCDTDALVEDLLRSGSTSPHTVSGGWAAWGPWSSCSRDCELGFRVRKRTCTNPESRNGGLPCVGDAAEYQDC
NPQACPVRGAWSCWTSWSPCSASCGGGHYQRTRSCTSPAPSPGEDICLGLHTEEALCATQACPEGWSPWSEWS
KCTDDGAQSRSRHCEELLPGSSACAGNSSQSRPCVD

| | | |
|---|---|---|
| NOV2e, 209829642 | SEQ ID NO: 13 | 1203 bp |
| DNA Sequence | ORF Start: at 1 | ORF Stop: end of sequence |

GGATCCGGCCCATGGTCACCATGGCAACCATGTGAGCACTTGGATGGGGACAACTCAGGCTCTTGCCTGTGTC
GAGCTCGATCCTGTGATTCCCCTCGACCCCGCTGTGGGGGCCTTGACTGCCTGGGGCCAGCCATCCACATCGC
CAACTGCTCCAGGAATGGGGCGTGGACCCCGTGGTCATCGTGGGCGCTGTGCAGCACGTCCTGTGGCATCGGC
TTCCAGGTCCGCCAGCGAAGTTGCAGCAACCCTGCTCCCCGCCACGGGGGCCGCATCTGCGTGGGCAAGAGCC
GGGAGGAACGGTTCTGTAATGAGAACACGCCTTGCCCGGTGCCCATCTTCTGGGCTTCCTGGGGCTCCTGGAG
CAAGTGCAGCAGCAACTGTGGAGGGGGCATGCAGTCGCGGCGTCGGGCCTGCGAGAACGGCAACTCCTGCCTG
GGCTGCGGCGTGGAGTTCAAGACGTGCAACCCCGAGGGCTGCCCCGAAGTGCGGCGCAACACCCCCTGGACGC
CGTGGCTGCCCGTGAACGTGACGCAGGGCGGGGCACGGCAGGAGCAGCGGTTCCGCTTCACCTGCCGCGCGCC
CCTTGCAGACCCGCACGGCCTGCAGTTCGGCAGGAGAAGGACCGAGACGAGGACCTGTCCCGCGGACGGCTCC
GGCTCCTGCGACACCGACGCCCTGGTGGAGGACCTCCTGCGCAGCGGGAGCACCTCCCCGCACACGGTGAGCG
GGGGCTGGGCCGCCTGGGGCCCGTGGTCGTCCTGCTCCCGGGACTGCGAGCTGGGCTTCCGCGTCCGCAAGAG
AACGTGCACTAACCCGGAGCCCCGCAACGGGGGCCTGCCCTGCGTGGGCCATGCTGCCGAGTACCAGGACTGC
AACCCCCAGGCTTGCCCAGTTCGGGGTGCTTGGTCCTGCTGGACCTCATGGTCTCCATGCTCAGCTTCCTGTG
GTGGGGGTCACTATCAACGCACCCGTTCCTGCACCAGCCCCGCACCCTCCCCAGGTGAGGACATCTGTCTCGG
GCTGCACACGGAGGAGGCACTATGTGCCACACAGGCCTGCCCAGAAGGCTGGTCGCCCTGGTCTGAGTGGAGT
AAGTGCACTGACGACGGAGCCCAGAGCCGAAGCCGGCACTGTGAGGAGCTCCTCCCAGGGTCCAGCGCCTGTG
CTGGAAACAGCAGCCAGAGCCGCCCCTGCGTCGAC

| | | | |
|---|---|---|---|
| NOV2e, 209829642 | | | |
| Protein Sequence | SEQ ID NO: 14 | 401 aa | MW at 43256.4kD |

GSGPWSPWQPCEHLDGDNSGSCLCRARSCDSPRPRCGGLDCLGPAIHIANCSRNGAWTPWSSWALCSTSCGIG
FQVRQRSCSNPAPRHGGRICVGKSREERFCNENTPCPVPIFWASWGSWSKCSSNCGGGMQSRRRACENGNSCL
GCGVEFKTCNPEGCPEVRRNTPWTPWLPVNVTQGGARQEQRFRFTCRAPLADPHGLQFGRRRTETRTCPADGS
GSCDTDALVEDLLRSGSTSPHTVSGGWAAWGPWSSCSRDCELGFRVRKRTCTNPEPRNGGLPCVGDAAEYQDC
NPQACPVRGAWSCWTSWSPCSASCGGGHYQRTRSCTSPAPSPGEDICLGLHTEEALCATQACPEGWSPWSEWS
KCTDDGAQSRSRHCEELLPGSSACAGNSSQSRPCVD

| | | |
|---|---|---|
| NOV2f, 209829670 | SEQ ID NO: 15 | 1203 bp |
| DNA Sequence | ORF Start: at 1 | ORF Stop: end of sequence |

GGATCCGCCCCATGGTCACCATGGCAACCATGTGAGCACTTGGATGGGGACAACTCAGGCTCTTGCCTGTGTC
GAGCTCGATCCTGTGATTCCCCTCGACCCCGCTGTGGGGGCCTTGACTGCCTGGGGCCAACCATCCACATCGC
CAACTGCTCCAGGAATGGGGCGTGGACCCCGTGGTCATCGTGGGCGCTGTGCAGCACGTCCTGTGGCATCGGC
TTCCAGGTCCGCCAGCGAAGTTGCAGCAACCCTGCTCCCCGCCACGGGGGCCGCATCTGCGTGGGCAAGAGCC
GGGAGGAACGGTTCTGTAATGAGAACACGCCTTGCCCGGTGCCCATCTTCTGGGCTTCCTGGGGCTCCTGGAG
CAAGTGCGGCAGCAACTGTGGAGGGGGCATGCAGTCGCGGCGTCGGGCCTGCGAGAACGGCAACTCCTGCCTG
GGCTGCGGCGTGGAGTTCAAGACGTGCAACCCCGAGGGCTGCCCCGAAGTGCGGCGCAACACCCCCTGGACGC
CGTGGCTGCCCGTGAACGTGACGCAGGGCGGGGCACGGCAGGAGCAGCGGTTCCGCTTCACCTGCCGCGCGCC
CCTTGCAGACCCGCACGGCCTGCAGTTCGGCAGGAGAAGGACCGAGACGAGGACCTGTCCCGCGGACGGCTCC
GGCTCCTGCGACACCGACGCCCTGGTGGAGGTCCTCCTGCGCAGCGGGAGCACCTCCCCGCACACGGTGAGCG
GGGGCTGGGCCGCCTGGGGCCCGTGGTCGTCCTGCTCCCGGGACTGCGAGCTGGGCTTCCGCGTCCGCAAGAG
AACGTGCACTAACCCGGAGCCCCGCAACGGGGGCCTGCCCTGCGTGGGCGATGCTGCCGAGTACCAGGACTGC
AACCCCCAGGCTTGCCCAGTTCGGGGTGCTTGGTCCTGCTGGACCTCATGGTCTCCATGCTCAGCTTCCTGTG
GTGGGGGTCACTATCAACGCACCCGTTCCTGCACCAGCCCCGCACCCTCCCCAGGTGAGGACATCTGTCTCGG
GCTGCACACGGAGGAGGCACTATGTGCCACACAGGCCTGCCCAGAAGGCTGGTCGCCCTGGTCTGAGTGGAGT
AAGTGCACTGACGACGGAGCCCAGAGCCGAAGCCGGCACTGTGAGGAGCTCCTCCCAGGGTCCAGCGCCTGTG
CTGGAAACAGCAGCCAGAGCCGCCCCTGCGTCGAC

| | | | |
|---|---|---|---|
| NOV2f, 209829670 | | | |
| Protein Sequence | SEQ ID NO: 16 | 401 aa | MW at 43240.5kD |

GSGPWSPWQPCEHLDGDNSGSCLCRARSCDSPRPRCGGLDCLGPTIHIANCSRNGAWTPWSSWALCSTSCGIG
FQVRQRSCSNPAPRHGGRICVGKSREERFCNENTPCPVPIFWASWGSWSKCGSNCGGGMQSRRRACENGNSCL
GCGVEFKTCNPEGCPEVRRNTPWTPWLPVNVTQGGARQEQRFRFTCRAPLADPHGLQFGRRRTETRTCPADGS
GSCDTDALVEVLLRSGSTSPHTVSGGWAAWGPWSSCSRDCELGFRVRKRTCTNPEPRNGGLPCVGDAAEYQDC
NPQACPVRGAWSCWTSWSPCSASCGGGHYQRTRSCTSPAPSPGEDICLGLHTEEALCATQACPEGWSPWSEWS
KCTDDGAQSRSRHCEELLPGSSACAGNSSQSRPCVD

| | | |
|---|---|---|
| NOV2g, CG106951-02 | SEQ ID NO: 17 | 4233 bp |
| DNA Sequence | ORF Start: ATG at 2 | ORF Stop: TGA at 3281 |

CATGGTGCTTGCAGGCCCCCTGGCTGTCTCGCTGTTGCTGCCCAGCCTCACACTGCTGGTGTCCCACCTCTCC
AGCTCCCAGGATGTCTCCAGTGAGCCCAGCAGTGAGCAGCAGCTGTGCGCCCTTAGCAAGCACCCCACCGTGG
CCTTTGAAGACCTGCAGCCGTGGGTCTCTAACTTCACCTACCCTGGAGCCCGGGATTTCTCCCAGCTGGCTTT
GGACCCCTCCGGGAACCAGCTCATCGTGGGAGCCAGGAACTACCTCTTCAGACTCAGCCTTGCCAATGTCTCT
CTTCTTCAGGCCACAGAGTGGGCCTCCAGTGAGGACACGCGCCGCTCCTGCCAAAGCAAAGGGAAGACTGAGG
AGGAGTGTCAGAACTACGTGCGAGTCCTGATCGTCGCCGGCCGGAAGGTGTTCATGTGTGGAACCAATGCCTT
TTCCCCCATGTGCACCAGCAGACAGGTGGGGAACCTCAGCCGGACTACTGAGAAGATCAATGGTGTGGCCCGC
TGCCCCTATGACCCACGCCACAACTCCACAGCTGTCATCTCCTCCCAGGGGGAGCTCTATGCAGCCACGGTCA
TCGACTTCTCAGGTCGGGACCCTGCCATCTACCGCAGCCTGGGCAGTGGGCCACCGCTTCGCACTGCCCAATA
TAACTCCAAGTGGCTTAATGAGCCAAACTTCGTGGCAGCCTATGATATTGGGCTGTTTGCATACTTCTTCCTG
CGGGAGAACGCAGTGGAGCACGACTGTGGACGCACCGTGTACTCTCGCGTGGCCCGCGTGTGCAAGAATGACG
TGGGGGGCCGATTCCTGCTGGAGGACACATGGACCACATTCATGAAGGCCCGGCTCAACTGCTCCCGCCCGGG
CGAGGTCCCCTTCTACTATAACGAGCTGCAGAGTGCCTTCCACTTGCCAGAGCAGGACCTCATCTATGGAGTT
TTCACAACCAACGTAAACAGCATCGCGGCTTCTGCTGTCTGCGCCTTCAACCTCAGTGCTATCTCCCAGGCTT
TCAATGGCCCATTTCGCTACCAGGAGAACCCCAGGGCTGCCTGGCTCCCCATAGCCAACCCCATCCCCAATTT
CCAGTGTGGCACCCTGCCTGAGACCGGTCCCAACGAGAACCTGACGGAGCGCAGCCTGCAGGACGCGCAGCGC
CTCTTCCTGATGAGCGAGGCCGTGCAGCCGGTGACACCCGAGCCCTGTGTCACCCAGGACAGCGTGCGCTTCT
CACACCTCGTGGTGGACCTGGTGCAGGCTAAAGACACGCTCTACCATGTACTCTACATTGGCACCGAGTCGGG
CACCATCCTGAAGGCGCTGTCCACGGCGAGCCGCAGCCTCCACGGCTGCTACCTGGAGGAGCTGCACGTGCTC
CCCCCCGGGCGCCGCGAGCCCCTGCGCAGCCTGCGCATCCTGCACAGCGCCCGCGCGCTCTTCGTGGGGCTGA
GAGACGGCGTCCTGCGGGTCCCACTGGAGAGGTGCGCCGCCTACCGCAGCCAGGGGGCATGCCTGGGGGCCCG
GGACCCGTACTGTGGCTGGGACGGGAAGCAGCAACGTTGCAGCACACTCGAGGACAGCTCCAACATGAGCCTC
TGGACCCAGAACATCACCGCCTGTCCTGTGCGGAATGTGACACGGGATGGGGGCTTCGGCCCATGGTCACCAT
GGCAACCATGTGAGCACTTGGATGGGGACAACTCAGGCTCTTGCCTGTGTCGAGCTCGATCCTGTGATTCCCC
TCGACCCCGCTGTGGGGGCCTTGACTGCCTGGGGCCAGCCATCCACATCGCCAACTGCTCCAGGAATGGGGCG
TGGACCCCGTGGTCATCGTGGGCGCTGTGCAGCACGTCCTGTGGCATCGGCTTCCAGGTCCGCCAGCGAAGTT
GCAGCAACCCTGCTCCCCGCCACGGGGGCCGCATCTGCGTGGGCAAGAGCCGGGAGGAACGGTTCTGTAATGA
GAACACGCCTTGCCCGGTGCCCATCTTCTGGGCTTCCTGGGGCTCCTGGAGCAAGTGCAGCAGCAACTGTGGA
GGGGGCATGCAGTCGCGGCGTCGGGCCTGCGAGAACGGCAACTCCTGCCTGGGCTGCGGCGTGGAGTTCAAGA
CGTGCAACCCCGAGGGCTGCCCCGAAGTGCGGCGCAACACCCCCTGGACGCCGTGGCTGCCCGTGAACGTGAC
GCAGGGCGGGGCACGGCAGGAGCAGCGGTTCCGCTTCACCTGCCGCGCGCCCCTTGCAGACCCGCACGGCCTG
CAGTTCGGCAGGAGAAGGACCGAGACGAGGACCTGTCCCGCGGACGGCTCCGGCTCCTGCGACACCGACGCCC
TGGTGGAGGACCTCCTGCGCAGCGGGAGCACCTCCCCGCACACGGTGAGCGGGGGCTGGGCCGCCTGGGGCCC
GTGGTCGTCCTGCTCCCGGGACTGCGAGCTGGGCTTCCGCGTCCGCAAGAGAACGTGCACTAACCCGGAGCCC
CGCAACGGGGGCCTGCCCTGCGTGGGCGATGCTGCCGAGTACCAGGACTGCAACCCCCAGGCTTGCCCAGTTC
GGGGTGCTTGGTCCTGCTGGACCTCATGGTCTCCATGCTCAGCTTCCTGTGGTGGGGGTCACTATCAACGCAC
CCGTTCCTGCACCAGCCCCGCACCCTCCCCAGGTGAGGACATCTGTCTCGGGCTGCACACGGAGGAGGCACTA
TGTGCCACACAGGCCTGCCCAGAAGGCTGGTCGCCCTGGTCTGAGTGGAGTAAGTGCACTGACGACGGAGCCC
AGAGCCGAAGCCGGCACTGTGAGGAGCTCCTCCCAGGGTCCAGCGCCTGTGCTGGAAACAGCAGCCAGAGCCG
CCCCTGCCCCTACAGCGAGATTCCCGTCATCCTGCCAGCCTCCAGCATGGAGGAGGCCACCGGCTGTGCAGGG
TTCAATCTCATCCACTTGGTGGCCACGGGCATCTCCTGCTTCTTGGGCTCTGGGCTCCTGACCCTAGCAGTGT
ACCTGTCTTGCCAGCACTGCCAGCGTCAGTCCCAGGAGTCCACACTGGTCCATCCTGCCACCCCCAACCATTT
GCACTACAAGGGCGGAGGCACCCCGAAGAATGAAAAGTACACACCCATGGAATTCAAGACCCTGAACAAGAAT
AACTTGATCCCTGATGACAGAGCCAACTTCTACCCATTGCAGCAGACCAATGTGTACACGACTACTTACTACC
CAAGCCCCCTGAACAAACACAGCTTCCGGCCCGAGGCCTCACCTGGACAACGGTGCTTCCCCAACAGCTGATA
CCGCCGTCCTGGGGACTTGGGCTTCTTGCCTTCATAAGGCACAGAGCAGATGGAGATGGGACAGTGGAGCCAG
TTTGGTTTTCTCCCTCTGCACTAGGCCAAGAACTTGCTGCCTTGCCTGTGGGGGGTCCCATCCGGCTTCAGAG
AGCTCTGGCTGGCATTGACCATGGGGGAAAGGGCTGGTTTCAGGCTGACATATGGCCGCAGGTCCACTTCAGC
CCAGGTCTCTCATGGTTATCTTCCAACCCACTGTCACGCTGACACTATGCTGCCATGCCTGGGCTGTGGACCT
ACTGGGCATTTGAGGAACTGGAGAATGGAGATGGCAAGAGGGCAGGCTTTTAAGTTTGGGTTGGAGACAACTT
CCTGTGGCCCCCACAAGCTGAGTCTGGCCTTCTCCAGCTGGCCCCAAAAAAGGCCTTTGCTACATCCTGATTA
TCTCTGAAAGTAATCAATCAAGTGGCTCCAGTAGCTCTGGATTTTCTGCCAGGGCTGGGCCATTGTGGTGCTG
CCCCAGTATGACATGGGACCAAGGCCAGCGCAGGTTATCCACCTCTGCCTGGAAGTCTATACTCTACCCAGGG
CATCCCTCTGGTCAGAGGCAGTGAGTACTGGGAACTGGAGGCTGACCTGTGCTTAGAAGTCCTTTAATCTGGG
CTGGTACAGGCCTCAGCCTTGCCCTCAATGCACGAAAGGTGGCCCAGGAGAGAGGATCAATGCCACAGGAGGC
AGAAGTCTGGCCTCTGTGCCTCTATGGAGACTATCTTCCAGTTGCTGCTCAACAGAGTTGTTGGCTGAGACCT
GCTTGGGAGTCTCTGCTGGCCCTTCATCTGTTCAGGAACACACACACACACACACTCACACACGCACACACAA
TCACAATTTGCTACAGCAACAAAAAAGACATTGGGCTGTGGCATTATTAATTAAAGATGATATCCAGTCTCC

| | | | |
|---|---|---|---|
| NOV2g, CG106951-02 | | | |
| Protein Sequence | SEQ ID NO: 18 | 1093 aa | MW at 119865.3kD |

MVLAGPLAVSLLLPSLTLLVSHLSSSQDVSSEPSSEQQLCALSKHPTVAFEDLQPWVSNFTYPGARDFSQLAL
DPSGNQLIVGARNYLFRLSLANVSLLQATEWASSEDTRRSCQSKGKTEEECQNYVRVLIVAGRKVFMCGTNAF
SPMCTSRQVGNLSRTTEKINGVARCPYDPRHNSTAVISSQGELYAATVIDFSGRDPAIYRSLGSGPPLRTAQY
NSKWLNEPNFVAAYDIGLFAYFFLRENAVEHDCGRTVYSRVARVCKNDVGGRFLLEDTWTTFMKARLNCSRPG
EVPFYYNELQSAFHLPEQDLIYGVFTTNVNSIAASAVCAFNLSAISQAFNGPFRYQENPRAAWLPIANPIPNF
QCGTLPETGPNENLTERSLQDAQRLFLMSEAVQPVTPEPCVTQDSVRFSHLVVDLVQAKDTLYHVLYIGTESG
TILKALSTASRSLHGCYLEELHVLPPGRREPLRSLRILHSARALFVGLRDGVLRVPLERCAAYRSQGACLGAR
DPYCGWDGKQQRCSTLEDSSNMSLWTQNITACPVRNVTRDGGFGPWSPWQPCEHLDGDNSGSCLCRARSCDSP
RPRCGGLDCLGPAIHIANCSRNGAWTPWSSWALCSTSCGIGFQVRQRSCSNPAPRHGGRICVGKSREERFCNE
NTPCPVPIFWASWGSWSKCSSNCGGGMQSRRRACENGNSCLGCGVEFKTCNPEGCPEVRRNTPWTPWLPVNVT
QGGARQEQRFRFTCRAPLADPHGLQFGRRRTETRTCPADGSGSCDTDALVEDLLRSGSTSPHTVSGGWAAWGP
WSSCSRDCELGFRVRKRTCTNPEPRNGGLPCVGDAAEYQDCNPQACPVRGAWSCWTSWSPCSASCGGGHYQRT
RSCTSPAPSPGEDICLGLHTEEALCATQACPEGWSPWSEWSKCTDDGAQSRSRHCEELLPGSSACAGNSSQSR
PCPYSEIPVILPASSMEEATGCAGFNLIHLVATGISCFLGSGLLTLAVYLSCQHCQRQSQESTLVHPATPNHL
HYKGGGTPKNEKYTPMEFKTLNKNNLIPDDRANFYPLQQTNVYTTTYYPSPLNKHSFRPEASPGQRCFPNS

| | | |
|---|---|---|
| NOV2h, CG106951-03 | SEQ ID NO: 19 | 1203 bp |
| DNA Sequence | ORF Start: at 7 | ORF Stop: at 1198 |

GGATCCGGCCCATGGTCACCATGGCAACCATGTGAGCACTTGGATGGGGACAACTCAGGCTCTTGCCTGTGTC
GAGCTCGATCCTGTGATTCCCCTCGACCCCGCTGTGGGGGCCTTGACTGCCTGGGGCCAACCATCCACATCGC
CAACTGCTCCAGGAATGGGGCGTGGACCCCGTGGTCATCGTGGGCGCTGTGCAGCACGTCCTGTGGCATCGGC
TTCCAGGTCCGCCAGCGAAGTTGCAGCAACCCTGCTCCCCGCCACGGGGGCCGCATCTGCGTGGGCAAGAGCC
GGGAGGAACGGTTCTGTAATGAGAACACGCCTTGCCCGGTGCCCATCTTCTGGGCTTCCTGGGGCTCCTGGAG
CAAGTGCGGCAGCAACTGTGGAGGGGGCATGCAGTCGCGGCGTCGGGCCTGCGAGAACGGCAACTCCTGCCTG
GGCTGCGGCGTGGAGTTCAAGACGTGCAACCCCGAGGGCTGCCCCGAAGTGCGGCGCAACACCCCCTGGACGC
CGTGGCTGCCCGTGAACGTGACGCAGGGCGGGGCACGGCAGGAGCAGCGGTTCCGCTTCACCTGCCGCGCGCC
CCTTGCAGACCCGCACGGCCTGCAGTTCGGCAGGAGAAGGACCGAGACGAGGACCTGTCCCGCGGACGGCTCC
GGCTCCTGCGACACCGACGCCCTGGTGGAGGTCCTCCTGCGCAGCGGGAGCACCTCCCCGCACACGGTGAGCG
GGGGCTGGGCCGCCTGGGGCCCGTGGTCGTCCTGCTCCCGGGACTCCGAGCTGGGCTTCCGCGTCCGCAAGAG
AACGTGCACTAACCCGGAGCCCCGCAACGGGGGCCTGCCCTGCGTGGGCGATGCTGCCGAGTACCAGGACTGC
AACCCCCAGGCTTGCCCAGTTCGGGGTGCTTGGTCCTGCTGGACCTCATGGTCTCCATGCTCAGCTTCCTGTG
GTGGGGGTCACTATCAACGCACCCGTTCCTGCACCAGCCCCGCACCCTCCCCAGGTGAGGACATCTGTCTCGG
GCTGCACACGGAGGAGGCACTATGTGCCACACAGGCCTGCCCAGAAGGCTGGTCGCCCTGGTCTGAGTGGAGT
AAGTGCACTGACGACGGAGCCCAGAGCCGAAGCCGGCACTGTGAGGAGCTCCTCCCAGGGTCGAGCGCCTGTG
CTGGAAACAGCAGCCAGAGCCGCCCCTGCGTCGAC

| | | | |
|---|---|---|---|
| NOV2h, CG106951-03 | | | |
| Protein Sequence | SEQ ID NO: 20 | 397 aa | MW at 42882.1kD |

GPWSPWQPCEHLDGDNSGSCLCRARSCDSPRPRCGGLDCLGPTIHIANCSRNGAWTPWSSWALCSTSCGIGFQ
VRQRSCSNPAPRHGGRICVGKSREERFCNENTPCPVPIFWASWGSWSKCGSNCGGGMQSRRRACENGNSCLGC
GVEFKTCNPEGCPEVRRNTPWTPWLPVNVTQGGARQEQRFRFTCRAPLADPHGLQFGRRRTETRTCPADGSGS
CDTDALVEVLLRSGSTSPHTVSGGWAAWGPWSSCSRDCELGFRVRKRTCTNPEPRNGGLPCVGDAAEYQDCNP
QACPVRGAWSCWTSWSPCSASCGGGHYQRTRSCTSPAPSPGEDICLGLHTEEALCATQACPEGWSPWSEWSKC
TDDGAQSRSRHCEELLPGSSACAGNSSQSRPC

| | | |
|---|---|---|
| | SEQ ID NO: 21 | 6408 bp |
| NOV2i, SNP13382456 of | ORF Start: ATG at 1400 | ORF Stop: TGA at 5456 |
| CG106951-01, DNA Sequence | SNP Pos: 5770 | SNP Change: C to T |

CCTGGGACTCTGGGAGAATGGTCCAGAGCTCATTGTCCTTGTTGATAAAATGATAGATTTGGACTCAATATCC
CATGCTGCCTCTTCCAACTTGATTTTTACCCCAGACTGGGCTACCAGACTGGTATGCCCACACATGCCCGTTT
CCTTTCTTTTCTTCTCTGCATCTCTGCCTTTGTGTCCAGAGCGTGTTTTCCCTTTGCAAGTTTCTCTCCATTC
TGCACATTATGAGTTTCAGCATTTCTGTTGCCCTAGAAAGTCTATCTTTGAGATCTTGCACTGTTTCTCTTTT
TACAGTGTCTCATAAACTCCCTTCTTGGATTCAGAACCACCCTTTCTTTCCCATTATCCTGTCAAACTGCTTC
TTGCCATGGTCCAGGGGTAGGAGGATGGCAGGCAGGAGGTGCTTCTCTGGGGCTCTTAGTGTCTCAATTCTTC
TGCTTTATCTGGGTTTTCCTTTACCCAGAATTTTATTATGTAAAATGCTTCACTCAGACTTTGTTCTAATTAT
CCAATTTTTGGCATACTCTAGAAAGTCTTTTGATATTTTCCTTCCTCCAACTTATCTATTTTTATTTCATAGT
TCTCTTTGGTTATCTCTTAGAATCACACTTTCCTGGTTTTAATTTTTCAAATCCTTTGTCTTTCTCACTCGTT
CTTAGGTCACCTTTTTTTACATTTTCAAATATATTTTTTGTTCAGCAGAGGGCTCCCTTCCCATCCCTCTTGC
AGCCCGGGCAGCTAGGATTTGAAGCTTGCCCCTTGAATCTTTCTCTCCCGCCTTCTAGCCATCAGAAACACTA
GATCACTTAAACTTGTAAACAATTCGGCCTCGCTCCTTGTGATTGCGCTAAACCTTCCGTCCTCAGCTGAGAA
CGCTCCACCACCTCCCCGGATCGCTCATCTCTTGGCTGCCCTCCCACTGTTCCTGATGTTATTTTACTCCCCG
TATCCCCTACTCGTTCTTCACAATTCTGTAGGGTGCGTATTACTAACCCCAGTTTACAGCTGAGGAAACTGAG
GCTTGGAGAGGTTCGCTCGGTATCGTACAGTTTGCAAGGTTAACCCTAATCCGGCCAGTTCTGGCTTTCCAGC
CCAGCCCAGCAGCCTAGCCTCCCTCTCTGCCGCTGCAGGTTATAACGGCTCTCCCCCGTTTTACACGAGGTCC
CTTCCCCTTCAAATCCACAGGCAGGAAGATCGTTCCGAACTGACGGGGCTGGGGAATGTGGGAGTCCGGAGTG
GGGTTTGGGGGAGCTTCCTCAGGCCCTGAGTGTTGGGGTGGGCAGGCCGCGCCGATGGCCCTCGGGGATGTCA
CATTCGAGATGGGGTGACCGAGAACGGCAAGGCGGGATGTGGCAAACGGCGGCAAGTGCTCGGAGTCCTAGGT
CTTGCCGCCGGAATGCCGGCCGGGGAAGGGGCTTCGGCCCACCGGGCTGGTCACCACACTCGGCAGGCCCGGG
GCGGGAGTCGGCCGAGCAGCCGCGGGATGCAGGGCGCCCCCTCGCGCTCCTCCGCGCGCCTCGAGGCTGGCGG
GTGCAGCGCCCGCCGCGGCAGGTCTGCTCCAGCCCCCTCCTCTTTTTCGCTCCCGCTCCCCTCCTTCTCTCCC
TTTGCTTGCAACTCCTCCCCCACCGCCCCCTCCCTCCTTCTGCTCCCGCGGTCTCCTCCTCCCTGCTCTCTCC
GAGCGCCGGGTCGGGAGCTAGTTGGAGCGCGGGGGTTGGTGCCAGAGCCCAGCTCCGCCGAGCCGGGCGGGTC
GGCAGCGCATCCAGCGGCTGCTGGGAGCCCGAGCGCAGCGGGCGCGGGCCCGGGTGGGGACTGCACCGGAGCG
CTGAGAGCTGGAGGCCGTTCCTGCGCGGCCGCCCCATTCCCAGACCGGCCGCCAGCCCATCTGGTTAGCTCCC
GCCGCTCCGCGCCGCCCGGGAGTCGGGAGCCGCGGGGAACCGGGCACCTGCACCCGCCTCTGGGAGTGAGTGG
TTCCAGCTGGTGCCTGGCCTGTGTCTCTTGGATGCCCTGTGGCTTCAGTCCGTCTCCTGTTGCCCACCACCTC
GTCCCTGGGCCGCCTGATACCCCAGCCCAACAGCTAAGGTGTGGATGGACAGTAGGGGGCTGGCTTCTCTCAC
TGGTCAGGGGTCTTCTCCCCTGTCTGCCTCCCGGAGCTAGGACTGCAGAGGGGCCTATCATGGTGCTTGCAGG
CCCCCTGGCTGTCTCGCTGTTGCTGCCCAGCCTCACACTGCTGGTGTCCCACCTCTCCAGCTCCCAGGATGTC
TCCAGTGAGCCCAGCAGTGAGCAGCAGCTGTGCGCCCTTAGCAAGCACCCCACCGTGGCCTTTGAAGACCTGC
AGCCGTGGGTCTCTAACTTCACCTACCCTGGAGCCCGGGATTTCTCCCAGCTGGCTTTGGACCCCTCCGGGAA
CCAGCTCATCGTGGGAGCCAGGAACTACCTCTTCAGACTCAGCCTTGCCAATGTCTCTCTTCTTCAGGCCACA
GAGTGGGCCTCCAGTGAGGACACGCGCCGCTCCTGCCAAAGCAAAGGGAAGACTGAGGAGGAGTGTCAGAACT
ACGTGCGAGTCCTGATCGTCGCCGGCCGGAAGGTGTTCATGTGTGGAACCAATGCCTTTTCCCCCATGTGCAC
CAGCAGACAGGTGGGGAACCTCAGCCGGACTACTGAGAAGATCAATGGTGTGGCCCGCTGCCCCTATGACCCA
CGCCACAACTCCACAGCTGTCATCTCCTCCCAGGGGGAGCTCTATGCAGCCACGGTCATCGACTTCTCAGGTC
GGGACCCTGCCATCTACCGCAGCCTGGGCAGTGGGCCACCGCTTCGCACTGCCCAATATAACTCCAAGTGGCT
TAATGAGCCAAACTTCGTGGCAGCCTATGATATTGGGCTGTTTGCATACTTCTTCCTGCGGGAGAACGCAGTG
GAGCACGACTGTGGACGCACCGTGTACTCTCGCGTGGCCCGCGTGTGCAAGAATGACGTGGGGGGCCGATTCC
TGCTGGAGGACACATGGACCACATTCATGAAGGCCCGGCTCAACTGCTCCCGCCCGGGCGAGGTCCCCTTCTA
CTATAACGAGCTGCAGAGTGCCTTCCACTTGCCAGAGCAGGACCTCATCTATGGAGTTTTCACAACCAACGTA
AACAGCATCGCGGCTTCTGCTGTCTGCGCCTTCAACCTCAGTGCTATCTCCCAGGCTTTCAATGGCCCATTTC
GCTACCAGGAGAACCCCAGGGCTGCCTGGCTCCCCATAGCCAACCCCATCCCCAATTTCCAGTGTGGCACCCT
GCCTGAGACCGGTCCCAACGAGAACCTGACGGAGCGCAGCCTGCAGGACGCGCAGCGCCTCTTCCTGATGAGC
GAGGCCGTGCAGCCGGTGACACCCGAGCCCTGTGTCACCCAGGACAGCGTGCGCTTCTCACACCTCGTGGTGG
ACCTGGTGCAGGCTAAAGACACGCTCTACCATGTACTCTACATTGGCACCGAGTCGGGCACCATCCTGAAGGC
GCTGTCCACGGCGAGCCGCAGCCTCCACGGCTGCTACCTGGAGGAGCTGCACGTGCTGCCCCCCGGGCGCCGC
GAGCCCCTGCGCAGCCTGCGCATCCTGCACAGCGCCCGCGCGCTCTTCGTGGGGCTGAGAGACGGCGTCCTGC
GGGTCCCACTGGAGAGGTGCGCCGCCTACCGCAGCCAGGGGGCATGCCTGGGGGCCCGGGACCCGTACTGTGG
CTGGGACGGGAAGCAGCAACGTTCCAGCACACTCGAGGACAGCTCCAACATGAGCCTCTGGACCCAGAACATC
ACCGCCTGTCCTGTGCGGAATGTGACACGGGATGGGGGCTTCGGCCCATGGTCACCATGGCAACCATGTGAGC
ACTTGGATGGGGACAACTCAGGCTCTTGCCTGTGTCGAGCTCGATCCTGTGATTCCCCTCGACCCCGCTGTGG
GGGCCTTGACTGCCTGGGGCCAGCCATCCACATCGCCAACTGCTCCAGGAATGGGGCGTGGACCCCGTCGTCA
TCGTGGGCGCTGTGCAGCACGTCCTGTGGCATCGGCTTCCAGGTCCGCCAGCGAAGTTGCAGCAACCCTGCTC
CCCGCCACGGGGGCCGCATCTGCGTGGGCAAGAGCCGGGAGGAACGGTTCTGTAATGAGAACACGCCTTGCCC
GGTGCCCATCTTCTGGGCTTCCTGGGGCTCCTGGAGCAAGTGCAGCAGCAACTGTGGAGGGGGCATGCAGTCG
CGGCGTCGGGCCTGCGAGAACGGCAACTCCTGCCTGGGCTGCGGCGTGGAGTTCAAGACGTGCAACCCCGAGG
GCTGCCCCGAAGTGCGGCGCAACACCCCCTGGACGCCGTGGCTGCCCGTGAACGTGACGCAGGGCGGGGCACG
GCAGGAGCAGCGGTTCCGCTTCACCTGCCGCGCGCCCCTTGCAGACCCGCACGGCCTGCAGTTCGGCAGGAGA
AGGACCGAGACGAGGACCTGTCCCGCGGACGGCTCCGGCTCCTGCGACACCGACGCCCTGGTGGAGGACCTCC
TGCGCAGCGGGAGCACCTCCCCGCACACGGTGAGCGGGGGCTGGGCCGCCTGGGGCCCGTGGTCGTCCTGCTC
CCGGGACTGCGAGCTGGGCTTCCGCGTCCGCAAGAGAACGTGCACTAACCCGGAGCCCCGCAACGGGGGCCTG
CCCTGCGTGGGCGATGCTGCCGAGTACCAGGACTGCAACCCCCAGGCTTGCCCAGTTCGGGCTGCTTGGTCCT
GCTGGACCTCATGGTCTCCATGCTCAGCTTCCTGTGGTGGGGGTCACTATCAACGCACCCGTTCCTGCACCAG
CCCCGCACCCTCCCCAGGTGAGGACATCTGTCTCGGGCTGCACACGGAGGAGGCACTATGTGCCACACAGGCC
TGCCCAGAAGGCTGGTCGCCCTGGTCTGAGTGGAGTAAGTGCACTGACGACGGAGCCCAGAGCCGAAGCCGGC
ACTGTGAGGAGCTCCTCCCAGGGTCCAGCGCCTGTGCTGGAAACAGCAGCCAGAGCCGCCCCTGCCCCTACAG
CGAGATTCCCGTCATCCTGCCAGCCTCCAGCATGGAGGAGGCCACCGGCTGTGCAGGGTTCAATCTCATCCAC
TTGGTGGCCACGGGCATCTCCTGCTTCTTGGGCTCTGGGCTCCTGACCCTAGCAGTGTACCTGTCTTGCCAGC
ACTGCCAGCGTCAGTCCCAGGAGTCCACACTGGTCCATCCTGCCACCCCCAACCATTTGCACTACAAGGGCGG
AGGCACCCCGAAGAATGAAAAGTACACACCCATGGAATTCAAGACCCTGAACAAGAATAACTTGATCCCTGAT
GACAGAGCCAACTTCTACCCATTGCAGCAGACCAATGTGTACACGACTACTTACTACCCAAGCCCCCTGAACA
AACACAGCTTCCGGCCCGAGGCCTCACCTGGACAACGGTGCTTCCCCAACAGCTGATACCGCCGTCCTGGGGA
CTTGGGCTTCTTGCCTTCATAAGGCACAGAGCAGATGGAGATGGGACAGTGGAGCCAGTTTGGTTTTCTCCCT
CTGCACTAGGCCAAGAACTTGCTGCCTTGCCTGTGGGGGGTCCCATCCGGCTTCAGAGAGCTCTGGCTGGCAT
TGACCATGGGGGAAAGGGCTGGTTTCAGGCTGACATATGGCCGCAGGTCCAGTTCAGCCCAGGTCTCTCATGG
TTATCTTCCAACCCACTGTCACGCTGACACTATGCTGCCATGCCTGGGCTGTGGACCTACTGGGCATTTGAGG
AATTGGAGAATGGAGATGGCAAGAGGGCAGGCTTTTAAGTTTGGGTTGGAGACAACTTCCTGTGGCCCCCACA
AGCTGAGTCTGGCCTTCTCCAGCTGGCCCCAAAAAAGGCCTTTGCTACATCCTGATTATCTCTGAAAGTAATC
AATCAAGTGGCTCCAGTAGCTCTGGATTTTCTGCCAGGGCTGGGCCATTGTGGTGCTGCCCCAGTATGACATG
GGACCAAGGCCAGCGCAGGTTATCCACCTCTGCCTGGAAGTCTATACTCTACCCAGGGCATCCCTCTGGTCAG
AGGCAGTGAGTACTGGGAACTGGAGGCTGACCTGTGCTTAGAAGTCCTTTAATCTGGGCTGGTACAGGCCTCA
GCCTTGCCCTCAATGCACGAAAGGTGGCCCAGGAGAGAGGATCAATGCCACAGGAGGCAGAAGTCTGGCCTCT
GTGCCTCTATGGAGACTATCTTCCAGTTGCTGCTCAACAGAGTTGTTGGCTGAGACCTGCTTGGGAGTCTCTG
CTGGCCCTTCATCTGTTCAGGAACACACACACACACACACTCACACACGCACACACAATCACAATTTGCTACA
GCAACAAAAAAGACATTGGGCTGTGGCATTATTAATTAAAGATGATATCCAGTCTCC

| | | | |
|---|---|---|---|
| NOV2i, SNP13382456 of | | | MW at 145674.1kD |
| CG106951-01, Protein Sequence | SEQ ID NO: 22 | 1352 aa | SNP Change: no change |

MPAGEGASAHRAGHHTRQARGGSRPSSRGMQGAPSRSSARLEAGGCSARRGRSAPAPSSFSLPLPSFSPFACN
SSPTAPSLLLLPRSPPPCSLRAPGRELVGARGLVPEPSSAEPGGSAAHPAAAGSPSAAGAGPGGDCTGALRAG
GRSCAAAPFPDRPPAHLVSSRRSAPPGSREPRGTGHLHPPLGVSGSSWCLACVSWMPCGFSPSPVAHHLVPGP
PDTPAQQLRCGWTVGGWLLSLVRGLLPCLPPGARTAEGPIMVLAGPLAVSLLLPSLTLLVSHLSSSQDVSSEP
SSEQQLCALSKHPTVAFEDLQPWVSNFTYPGARDFSQLALDPSGNQLIVGARNYLFRLSLANVSLLQATEWAS
SEDTRRSCQSKGKTEEECQNYVRVLIVAGRKVFMCGTNAFSPMCTSRQVGNLSRTTEKINGVARCPYDPRHNS
TAVISSQGELYAATVIDFSGRDPAIYRSLGSGPPLRTAQYNSKWLNEPNFVAAYDIGLFAYFFLRENAVEHDC
GRTVYSRVARVCKNDVGGRFLLEDTWTTFMKARLNCSRPGEVPFYYNELQSAFHLPEQDLIYGVFTTNVNSIA
ASAVCAFNLSAISQAFNGPFRYQENPRAAWLPIANPIPNFQCGTLPETGPNENLTERSLQDAQRLFLMSEAVQ
PVTPEPCVTQDSVRFSHLVVDLVQAKDTLYHVLYIGTESGTILKALSTASRSLHGCYLEELHVLPPGRREPLR
SLRILHSARALFVGLRDGVLRVPLERCAAYRSQGACLGARDPYCCWDGKQQRCSTLEDSSNMSLWTQNITACP
VRNVTRDGGFGPWSPWQPCEHLDGDNSGSCLCRARSCDSPRPRCGGLDCLGPAIHIANCSRNGAWTPWSSWAL
CSTSCGIGFQVRQRSCSNPAPRHGGRICVGKSREERFCNENTPCPVPIFWASWGSWSKCSSNCGGCMQSRRRA
CENGNSCLGCGVEFKTCNPEGCPEVRRNTPWTPWLPVNVTQGGARQEQRFRFTCRAPLADPHGLQFGRRRTET
RTCPADGSGSCDTDALVEDLLRSGSTSPHTVSGGWAAWGPWSSCSRDCELGFRVRKRTCTNPEPRNGGLPCVG
DAAEYQDCNPQACPVRGAWSCWTSWSPCSASCGGGHYQRTRSCTSPAPSPGEDICLGLHTEEALCATQACPEG
WSPWSEWSKCTDDGAQSRSRHCEELLPGSSACAGNSSQSRPCPYSEIPVILPASSMEEATGCAGFNLIHLVAT
GISCFLGSGLLTLAVYLSCQHCQRQSQESTLVHPATPNHLHYKGGGTPKNEKYTPMEFKTLNKNNLIPDDRAN
FYPLQQTNVYTTTYYPSPLNKHSFRPEASPGQRCFPNS

[0364] A ClustalW comparison of the above protein sequences yields the following sequence alignment shown in Table 2B.

TABLE 2B

| Comparison of the NOV2 protein sequences. | |
|---|---|
| NOV2a | MPAGEGASAHRAGHHTRQARGGSRPSSRGMQGAPSRSSARLEAGGCSARRGRSAPAPSSF |
| NOV2b | ------------------------------------------------------------ |
| NOV2c | ------------------------------------------------------------ |
| NOV2d | ------------------------------------------------------------ |
| NOV2e | ------------------------------------------------------------ |
| NOV2f | ------------------------------------------------------------ |
| NOV2g | ------------------------------------------------------------ |
| NOV2h | ------------------------------------------------------------ |
| NOV2a | SLPLPSFSPFACNSSPTAPSLLLLPRSPPPCSLRAPGRELVGARGLVPEPSSAEPGGSAA |
| NOV2b | ------------------------------------------------------------ |
| NOV2c | ------------------------------------------------------------ |
| NOV2d | ------------------------------------------------------------ |
| NOV2e | ------------------------------------------------------------ |
| NOV2f | ------------------------------------------------------------ |
| NOV2g | ------------------------------------------------------------ |
| NOV2h | ------------------------------------------------------------ |
| NOV2a | HPAAAGSPSAAGAGPGGDCTGALRAGGRSCAAAPFPDRPPAHLVSSRRSAPPGSREPRGT |
| NOV2b | ------------------------------------------------------------ |
| NOV2c | ------------------------------------------------------------ |
| NOV2d | ------------------------------------------------------------ |
| NOV2e | ------------------------------------------------------------ |
| NOV2f | ------------------------------------------------------------ |
| NOV2g | ------------------------------------------------------------ |
| NOV2h | ------------------------------------------------------------ |
| NOV2a | GHLHPPLGVSGSSWCLACVSWMPCGFSPSPVAHHLVPGPPDTPAQQLRCGWTVGGWLLSL |
| NOV2b | ---------------------MPCGFSPSPVAHHLVPGPPDTPAQQLRCGWTVGGWLLSL |
| NOV2c | ------------------------------------------------------------ |
| NOV2d | ------------------------------------------------------------ |
| NOV2e | ------------------------------------------------------------ |
| NOV2f | ------------------------------------------------------------ |
| NOV2g | ------------------------------------------------------------ |
| NOV2h | ------------------------------------------------------------ |
| NOV2a | VRGLLPCLPPGARTAEGPIMVLAGPLAVSLLLPSLTLLVSHLSSSQDVSSEPSSEQQLCA |
| NOV2b | VRGLLPCLPPGARTAEGPIMVLAGPLAVSLLLPSLTLLVSHLSSSQDVSSEPSSEQQLCA |
| NOV2c | ------------------------------------------------------------ |
| NOV2d | ------------------------------------------------------------ |
| NOV2e | ------------------------------------------------------------ |
| NOV2f | ------------------------------------------------------------ |
| NOV2g | -------------------MVLAGPLAVSLLLPSLTLLVSHLSSSQDVSSEPSSEQQLCA |
| NOV2h | ------------------------------------------------------------ |
| NOV2a | LSKHPTVAFEDLQPWVSNFTYPGARDFSQLALDPSGNQLIVGARNYLFRLSLANVSLLQA |
| NOV2b | LSKHPTVAFEDLQPWVSNFTYPGARDFSQLALDPSGNQLIVGARNYLFRLSLANVSLLQA |
| NOV2c | ------------------------------------------------------------ |
| NOV2d | ------------------------------------------------------------ |
| NOV2e | ------------------------------------------------------------ |
| NOV2f | ------------------------------------------------------------ |
| NOV2g | LSKHPTVAFEDLQPWVSNFTYPGARDFSQLALDPSGNQLIVGARNYLFRLSLANVSLLQA |
| NOV2h | ------------------------------------------------------------ |
| NOV2a | TEWASSEDTRRSCQSKGKTEEECQNYVRVLIVAGRKVFMCGTNAFSPMCTSRQVGNLSRT |
| NOV2b | TEWASSEDTRRSCQSKGKTEEECQNYVRVLIVAGRKVFMCGTNAFSPMCTSRQVGNLSRT |
| NOV2c | ------------------------------------------------------------ |
| NOV2d | ------------------------------------------------------------ |
| NOV2e | ------------------------------------------------------------ |
| NOV2f | ------------------------------------------------------------ |
| NOV2g | TEWASSEDTRRSCQSKGKTEEECQNYVRVLIVAGRKVFMCGTNAFSPMCTSRQVGNLSRT |
| NOV2h | ------------------------------------------------------------ |
| NOV2a | TEKINGVARCPYDPRHNSTAVISSQGELYAATVIDFSGRDPAIYRSLGSGPPLRTAQYNS |
| NOV2b | TEKINGVARCPYDPRHNSTAVISSQGELYAATVIDFSGRDPAIYRSLGSGPPLRTAQYNS |
| NOV2c | ------------------------------------------------------------ |
| NOV2d | ------------------------------------------------------------ |
| NOV2e | ------------------------------------------------------------ |
| NOV2f | ------------------------------------------------------------ |
| NOV2g | TEKINGVARCPYDPRHNSTAVISSQGELYAATVIDFSGRDPAIYRSLCSGPPLRTAQYNS |
| NOV2h | ------------------------------------------------------------ |
| NOV2a | KWLNEPNFVAAYDIGLFAYFFLRENAVEHDCGRTVYSRVARVCKNDVGGRFLLEDTWTTF |
| NOV2b | KWLNEPNFVAAYDIGLFAYFFLRENAVEHDCGRTVYSRVARVCKNDVGGRFLLEDTWTTF |
| NOV2c | ------------------------------------------------------------ |
| NOV2d | ------------------------------------------------------------ |
| NOV2e | ------------------------------------------------------------ |
| NOV2f | ------------------------------------------------------------ |
| NOV2g | KWLNEPNFVAAYDIGLFAYFFLRENAVEHDCGRTVYSRVARVCKNDVGGRFLLEDTWTTF |
| NOV2h | ------------------------------------------------------------ |
| NOV2a | MKARLNCSRPGEVPFYYNELQSAFHLPEQDLIYGVFTTNVNSIAASAVCAFNLSAISQAF |
| NOV2b | MKARLNCSRPGEVPFYYNELQSAFHLPEQDLIYGVFTTNVNSIAASAVCAFNLSAISQAF |
| NOV2c | ------------------------------------------------------------ |
| NOV2d | ------------------------------------------------------------ |
| NOV2e | ------------------------------------------------------------ |
| NOV2f | ------------------------------------------------------------ |
| NOV2g | MKARLNCSRPGEVPFYYNELQSAFHLPEQDLIYGVFTTNVNSIAASAVCAFNLSAISQAF |
| NOV2h | ------------------------------------------------------------ |
| NOV2a | NGPFRYQENPRAAWLPIANPIPNFQCGTLPETGPNENLTERSLQDAQRLFLMSEAVQPVT |
| NOV2b | NGPFRYQENPRAAWLPIANPIPNFQCGTLPETGPNENLTERSLQDAQRLFLMSEAVQPVT |
| NOV2c | ------------------------------------------------------------ |
| NOV2d | ------------------------------------------------------------ |
| NOV2e | ------------------------------------------------------------ |
| NOV2f | ------------------------------------------------------------ |
| NOV2g | NGPFRYQENPRAAWLPIANPIPNFQCGTLPETGPNENLTERSLQDAQRLFLMSEAVQPVT |
| NOV2h | ------------------------------------------------------------ |
| NOV2a | PEPCVTQDSVRFSHLVVDLVQAKDTLYHVLYIGTESGTILKALSTASRSLHGCYLEELHV |
| NOV2b | PEPCVTQDSVRFSHLVVDLVQAKDTLYHVLYIGTESGTILKALSTASRSLHGCYLEELHV |
| NOV2c | ------------------------------------------------------------ |
| NOV2d | ------------------------------------------------------------ |
| NOV2e | ------------------------------------------------------------ |
| NOV2f | ------------------------------------------------------------ |
| NOV2g | PEPCVTQDSVRFSHLVVDLVQAKDTLYHVLYIGTESGTILKALSTASRSLHGCYLEELHV |
| NOV2h | ------------------------------------------------------------ |
| NOV2a | LPPGRREPLRSLRILHSARALFVGLRDGVLRVPLERCAAYRSQGACLGARDPYCGWDGKQ |
| NOV2b | LPPGRREPLRSLRILHSARALFVGLRDGVLRVPLERCAAYRSQGACLGARDPYCGWDGKQ |
| NOV2c | ------------------------------------------------------------ |
| NOV2d | ------------------------------------------------------------ |
| NOV2e | ------------------------------------------------------------ |
| NOV2f | ------------------------------------------------------------ |
| NOV2g | LPPGRREPLRSLRILHSARALFVGLRDGVLRVPLERCAAYRSQGACLGARDPYCGWDGKQ |
| NOV2h | ------------------------------------------------------------ |
| NOV2a | QRCSTLEDSSNMSLWTQNITACPVRNVTRDGGFGPWSPWQPCEHLDGDNSGSCLCRARSC |
| NOV2b | QRCSTLEDSSNMSLWTQNITACPVRNVTRDGGFGPWSPWQPCEHLDGDNSGSCLCRARSC |
| NOV2c | -------------------------------GSGPWSPWQPCEHLDGDNSGSCLCRARSC |
| NOV2d | -------------------------------GSGPWSPWQPCEHLDGDNSGSCLCRARSC |
| NOV2e | -------------------------------GSGPWSPWQPCEHLDGDNSGSCLCRARSC |
| NOV2f | -------------------------------GSGPWSPWQPCEHLDGDNSGSCLCRARSC |
| NOV2g | QRCSTLEDSSNMSLWTQNITACPVRNVTRDGGFGPWSPWQPCEHLDGDNSGSCLCRARSC |
| NOV2h | ---------------------------------GPWSPWQPCEHLDGDNSGSCLCRARSC |
| NOV2a | DSPRPRCGGLDCLGPAIHIANCSRNGAWTPWSSWALCSTSCGIGFQVRQRSCSNPAPRHG |
| NOV2b | DSPRPRCGGLDCLGPAIHIANCSRNGAWTPWSSWALCSTSCGIGFQVRQRSCSNPAPHG |
| NOV2c | DSPRPRCGGLDCLGPAIHIANCSRNGAWTPWSSWALCSTSCGIGFQVRQRSCSNPAPRHG |
| NOV2d | DSPRPRCGGLDCLGPAIHIANCSRNGAWTPWSSWALCSTSCGIGFQVRQRSCSNPAPRHG |
| NOV2e | DSPRPRCGGLDCLGPAIHIANCSRNGAWTPWSSWALCSTSCGIGFQVRQRSCSNPAPRHG |
| NOV2f | DSPRPRCGGLDCLGPTIHIANCSRNGAWTPWSSWALCSTSCGIGFQVRQRSCSNPAPRHG |
| NOV2g | DSPRPRCGGLDCLGPAIHIANCSRNGAWTPWSSWALCSTSCGIGFQVRQRSCSNPAPRHG |
| NOV2h | DSPRPRCGGLDCLGPTIHIANCSRNGAWTPWSSWALCSTSCGIGFQVRQRSCSNPAPRHG |
| NOV2a | GRICVGKSREERFCNENTPCPVPIFWASWGSWSKCSSNCGGGMQSRRRACENGNSCLGCG |
| NOV2b | GRICVGKSREERFCNENTPCPVPIFWASWGSWSKCSSNCGGGMQSRRRACENGNSCLGCG |
| NOV2c | GRICVGKSREERFCNENTPCPVPIFWASWGSWSKCSSNCGGGMRSRRRACENGNSCLGCG |
| NOV2d | GRICVGKSREERFCNENTPCPVPIFWASWGSWSKCSSNCGGGMQSRRRACENGNSCLGCG |
| NOV2e | GRICVGKSREERFCNENTPCPVPIFWASWGSWSKCSSNCGGGMQSRRRACENGNSCLGCG |
| NOV2f | GRICVGKSREERFCNENTPCPVPIFWASWGSWSKCGSNCGGGMQSRRRACENGNSCLGCG |
| NOV2g | GRICVGKSREERFCNENTPCPVPIFWASWGSWSKCSSNCGGGMQSRRRACENGNSCLGCG |
| NOV2h | GRICVGKSREERFCNENTPCPVPIFWASWGSWSKCGSNCGGGMQSRRRACENGNSCLGCG |
| NOV2a | VEFKTCNPEGCPEVRRNTPWTPWLPVNVTQGGARQEQRFRFTCRAPLADPHGLQFGRRRT |
| NOV2b | VEFKTCNPEGCPEVRRNTPWTPWLPVNVTQGGARQEQRFRFTCRAPLADPHGLQFGRRRT |
| NOV2c | VEFKTCNPEGCPEVRRNTPWTPWLPVNVTQGGARQEQRFRFTCRAPLADPHGLQFGRRRT |
| NOV2d | VEFKTCNPEGCPEVRRNTPWTPWLPVNVTQGGARQEQRFRFTCRAPLADPHGLQFGRRRT |
| NOV2e | VEFKTCNPEGCPEVRRNTPWTPWLPVNVTQGGARQEQRFRFTCRAPLADPHGLQFGRRRT |
| NOV2f | VEFKTCNPEGCPEVRRNTPWTPWLPVNVTQGGARQEQRFRFTCRAPLADPHGLQFGRRRT |
| NOV2g | VEFKTCNPEGCPEVRRNTPWTPWLPVNVTQGGARQEQRFRFTCRAPLADPHGLQFGRRRT |
| NOV2h | VEFKTCNPEGCPEVRRNTPWTPWLPVNVTQGGARQEQRFRFTCRAPLADPHGLQFGRRRT |
| NOV2a | ETRTCPADGSGSCDTDALVEDLLRSGSTSPHTVSGGWAAWGPWSSCSRDCELGFRVRKRT |
| NOV2b | ETRTCPADGSGSCDTDALVEDLLRSGSTSPHTVSGGWAAWGPWSSCSRDCELGFRVRKRT |
| NOV2c | ETRTCPADGSGSCDTDALVEDLLRSGSTSPHTVSGGWAAWGPWSSCSRDCELGFRVRKRT |
| NOV2d | ETRTCPADGSGSCDTDALVEDLLRSGSTSPHTVSGGWAAWGPWSSCSRDCELGFRVRKRT |
| NOV2e | ETRTCPADGSGSCDTDALVEDLLRSGSTSPHTVSGGWAAWGPWSSCSRDCELGFRVRKRT |
| NOV2f | ETRTCPADGSGSCDTDALVEVLLRSGSTSPHTVSGGWAAWGPWSSCSRDCELGFRVRKRT |
| NOV2g | ETRTCPADGSGSCDTDALVEDLLRSGSTSPHTVSGGWAAWGPWSSCSRDCELGFRVRKRT |
| NOV2h | ETRTCPADGSGSCDTDALVEVLLRSGSTSPHTVSGGWAAWGPWSSCSRDCELGFRVRKRT |
| NOV2a | CTNPEPRNGGLPCVGDAAEYQDCNPQACPVRGAWSCWTSWSPCSASCGGGHYQRTRSCTS |
| NOV2b | CTNPEPRNGGLPCVGDAAEYQDCNPQACPVRGAWSCWTSWSPCSASCGGGHYQRTRSCTS |
| NOV2c | CTNPEPRNGGLPCVGDAAEYQDCNPQACPVRGAWSCWTSWSPCSASCGGGHYQRTRSCTS |
| NOV2d | CTNPESRNGGLPCVGDAAEYQDCNPQACPVRGAWSCWTSWSPCSASCGGGHYQRTRSCTS |
| NOV2e | CTNPEPRNGGLPCVGDAAEYQDCNPQACPVRGAWSCWTSWSPCSASCGGGHYQRTRSCTS |
| NOV2f | CTNPEPRNGGLPCVGDAAEYQDCNPQACPVRGAWSCWTSWSPCSASCGGGHYQRTRSCTS |
| NOV2g | CTNPEPRNGGLPCVGDAAEYQDCNPQACPVRGAWSCWTSWSPCSASCGGGHYQRTRSCTS |
| NOV2h | CTNPEPRNGGLPCVGDAAEYQDCNPQACPVRGAWSCWTSWSPCSASCGGGHYQRTRSCTS |
| NOV2a | PAPSPGEDICLGLHTEEALCATQACPEGWSPWSEWSKCTDDGAQSRSRHCEELLPGSSAC |
| NOV2b | PAPSP---------------------EGWSPWSEWSKCTDDGAQSRSRHCEELLPGSSAC |
| NOV2c | PAPSPGEDICLGLHTEEALCATQACPEGWSPWSEWSKCTDDGAQSRSRHCEELLPGSSAC |
| NOV2d | PAPSPGEDICLGLHTEEALCATQACPEGWSPWSEWSKCTDDGAQSRSRHCEELLPGSSAC |
| NOV2e | PAPSPGEDICLGLHTEEALCATQACPEGWSPWSEWSKCTDDGAQSRSRHCEELLPGSSAC |
| NOV2f | PAPSPGEDICLGLHTEEALCATQACPEGWSPWSEWSKCTDDGAQSRSRHCEELLPGSSAC |
| NOV2g | PAPSPGEDICLGLHTEEALCATQACPEGWSPWSEWSKCTDDGAQSRSRHCEELLPGSSAC |
| NOV2h | PAPSPGEDICLGLHTEEALCATQACPEGWSPWSEWSKCTDDGAQSRSRHCEELLPGSSAC |
| NOV2a | AGNSSQSRPCPYSEIPVILPASSMEEATGCAGFNLIHLVATGISCFLGSGLLTLAVYLSC |
| NOV2b | AGNSSQSRPCPYSEIPVILPASSMEEATGCAGFNLIHLVATGISCFLGSGLLTLAVYLSC |
| NOV2c | AGNSSQSRPCVD------------------------------------------------ |
| NOV2d | AGNSSQSRPCVD------------------------------------------------ |
| NOV2e | AGNSSQSRPCVD------------------------------------------------ |
| NOV2f | AGNSSQSRPCVD------------------------------------------------ |
| NOV2g | AGNSSQSRPCPYSEIPVILPASSMEEATGCAGFNLIHLVATGISCFLGSGLLTLAVYLSC |
| NOV2h | AGNSSQSRPC-------------------------------------------------- |
| NOV2a | QHCQRQSQESTLVHPATPNHLHYKGGGTPKNEKYTPMEFKTLNKNNLIPDDRANFYPLQQ |
| NOV2b | QHCQRQSQESTLVHPATPNHLHYKGGGTPKNEKYTPMEFKTLNKNNLIPDDRANFYPLQQ |
| NOV2c | ------------------------------------------------------------ |
| NOV2d | ------------------------------------------------------------ |
| NOV2e | ------------------------------------------------------------ |
| NOV2f | ------------------------------------------------------------ |
| NOV2g | QHCQRQSQESTLVHPATPNHLHYKGGGTPKNEKYTPMEFKTLNKNNLIPDDRANFYPLQQ |
| NOV2h | ------------------------------------------------------------ |
| NOV2a | TNVYTTTYYPSPLNKHSFRPEASPGQRCFPNS |
| NOV2b | TNVYTTTYYPSPLNKHSFRPEASPGQRCFPNS |
| NOV2c | -------------------------------- |
| NOV2d | -------------------------------- |
| NOV2e | -------------------------------- |
| NOV2f | -------------------------------- |
| NOV2g | TNVYTTTYYPSPLNKHSFRPEASPGQRCFPNS |
| NOV2h | -------------------------------- |
| NOV2a | (SEQ ID NO: 6) |
| NOV2b | (SEQ ID NO: 8) |
| NOV2c | (SEQ ID NO: 10) |
| NOV2d | (SEQ ID NO: 12) |
| NOV2e | (SEQ ID NO: 14) |
| NOV2f | (SEQ ID NO: 16) |
| NOV2g | (SEQ ID NO: 18) |
| NOV2h | (SEQ ID NO: 20) |

[0365] Further analysis of the NOV2a protein yielded the following properties shown in Table 2C.

TABLE 2C
Protein Sequence Properties NOV2a

| SignalP | No Known Signal Sequence Predicted | | | |
|---|---|---|---|---|
| analysis: | | | | |
| PSORT II | PSG: a new signal peptide prediction method | | | |
| analysis: | N-region: length 11; pos. chg 1; neg. chg 1 | | | |
| | H-region: length 5; peak value −8.91 | | | |
| | PSG score: −13.31 | | | |
| | GvH: von Heijne's method for signal seq. recognition | | | |
| | GvH score (threshold: −2.1): −7.65 | | | |
| | possible cleavage site: between 53 and 54 | | | |
| | >>> Seems to have no N-terminal signal peptide | | | |
| | ALOM: Klein et al's method for TM region allocation | | | |
| | Init position for calculation: 1 | | | |
| | Tentative number of TMS(s) for the threshold 0.5: 3 | | | |
| | Number of TMS(s) for threshold 0.5: 1 | | | |
| | INTEGRAL | Likelihood = | −4.83 | Transmembrane 259-275 |
| | PERIPHERAL | Likelihood = | 1.54 (at 232) | |
| | ALOM score: −4.83 (number of TMSs: 1) | | | |
| | MTOP: Prediction of membrane topology (Hartmann et al.) | | | |
| | Center position for calculation: 266 | | | |
| | Charge difference: −3.5 C(−2.5)-N(1.0) | | | |
| | N >= C: N-terminal side will be inside | | | |
| | >>> membrane topology: type 2 (cytoplasmic tail 1 to 259) | | | |
| | MITDISC: discrimination of mitochondrial targeting seq | | | |
| | R content: | 7 | Hyd Moment(75): | 4.89 |
| | Hyd Moment(95): | 4.42 | G content: | 7 |
| | D/E content: | 2 | S/T content: | 8 |

```
Score: −1.94
Gavel: prediction of cleavage sites for mitochondrial preseq
R-2 motif at 104 LRA|PG
NUCDISC: discrimination of nuclear localization signals
pat4: none
pat7: none
bipartite: none
content of basic residues: 9.3%
NLS Score: −0.47
KDEL: ER retention motif in the C-terminus: none
ER Membrane Retention Signals: none
SKL: peroxisomal targeting signal in the C-terminus: none
PTS2: 2nd peroxisomal targeting signal: none
VAC: possible vacuolar targeting motif: none
RNA-binding motif: none
Actinin-type actin-binding motif:
type 1: none
type 2: none
NMYR: N-myristoylation pattern: none
Prenylation motif: none
memYQRL: transport motif from cell surface to Golgi: none
Tyrosines in the tail: too long tail
Dileucine motif in the tail: found
LL at 81
LL at 82
LL at 83
LL at 237
checking 63 PROSITE DNA binding motifs: none
checking 71 PROSITE ribosomal protein motifs: none
checking 33 PROSITE prokaryotic DNA binding motifs: none
NNCN: Reinhardt's method for Cytoplasmic/Nuclear discrimination
Prediction: nuclear
Reliability: 94.1
COIL: Lupas's algorithm to detect coiled-coil regions
total: 0 residues
Final Results (k = 9/23):
47.8%: nuclear
26.1%: mitochondrial
  8.7%: cytoplasmic
  4.3%: Golgi
  4.3%: plasma membrane
  4.3%: extracellular, including cell wall
  4.3%: peroxisomal
>> prediction for CG106951-01 is nuc (k = 23)
```

[0366] A search of the NOV2a protein against the Geneseq database, a proprietary database that contains sequences published in patents and patent publication, yielded several homologous proteins shown in Table 2D.

TABLE 2D
Geneseq Results for NOV2a

| | | NOV2a | | |
|---|---|---|---|---|
| | | Residues/ | Identities/ | |
| Geneseq | Protein/Organism/Length [Patent | Match | Similarities for the | Expect |
| Identifier | #, Date] | Residues | Matched Region | Value |
| AAE18212 | Human MOL4 protein - Homo | 1 . . . 1352 | 1352/1352 (100%) | 0.0 |
| | sapiens, 1352 aa. | 1 . . . 1352 | 1352/1352 (100%) | |
| | [WO200206339-A2, 24 JAN. 2002] | | | |
| AAG68293 | Human semaphorin G-like NHP | 202 . . . 1352 | 1150/1151 (99%) | 0.0 |
| | protein SEQ ID NO: 10 - Homo | 1 . . . 1151 | 1150/1151 (99%) | |
| | sapiens, 1151 aa. | | | |
| | [WO200188133-A2, 22 NOV. 2001] | | | |
| AAG68294 | Human semaphorin G-like NHP | 202 . . . 1352 | 1135/1151 (98%) | 0.0 |
| | protein SEQ ID NO: 12 - Homo | 1 . . . 1136 | 1135/1151 (98%) | |
| | sapiens, 1136 aa. | | | |
| | [WO200188133-A2, 22 NOV. 2001] | | | |
| AAG68290 | Human semaphorin G-like NHP | 260 . . . 1352 | 1092/1093 (99%) | 0.0 |
| | protein SEQ ID NO: 4 - Homo | 1 . . . 1093 | 1092/1093 (99%) | |
| | sapiens, 1093 aa. | | | |
| | [WO200188133-A2, 22 NOV. 2001] | | | |
| AAG68292 | Human semaphorin G-like NHP | 260 . . . 1352 | 1077/1093 (98%) | 0.0 |
| | protein SEQ ID NO: 8 - Homo | 1 . . . 1078 | 1077/1093 (98%) | |
| | sapiens, 1078 aa. | | | |
| | [WO200188133-A2, 22 NOV. 2001] | | | |

[0367] In a BLAST search of public sequence databases, the NOV2a protein was found to have homology to the proteins shown in the BLASTP data in Table 2E.

TABLE 2E
Public BLASTP Results for NOV2a

| | | NOV2a | | |
|---|---|---|---|---|
| Protein | | Residues/ | Identities/ | |
| Accession | | Match | Similarities for the | Expect |
| Number | Protein/Organism/Length | Residues | Matched Portion | Value |
| Q9P283 | Hypothetical protein KIAA1445 - | 151 . . . 1352 | 1202/1202 (100%) | 0.0 |
| | Homo sapiens (Human), 1202 aa | 1 . . . 1202 | 1202/1202 (100%) | |
| | (fragment). | | | |
| Q60519 | Semaphorin 5B precursor | 260 . . . 1352 | 1021/1093 (93%) | 0.0 |
| | (Semaphorin G) (Sema G) - Mus | 1 . . . 1093 | 1053/1093 (95%) | |
| | musculus (Mouse), 1093 aa. | | | |
| Q13591 | Semaphorin 5A precursor | 299 . . . 1336 | 616/1043 (59%) | 0.0 |
| | (Semaphorin F) (Sema F) - Homo | 30 . . . 1071 | 781/1043 (74%) | |
| | sapiens (Human), 1074 aa. | | | |
| Q62217 | Semaphorin 5A precursor | 299 . . . 1336 | 617/1046 (58%) | 0.0 |
| | (Semaphorin F) (Sema F) - Mus | 30 . . . 1074 | 776/1046 (73%) | |
| | musculus (Mouse), 1077 aa. | | | |
| Q8BXU8 | Sema domain - Mus musculus | 299 . . . 1109 | 507/811 (62%) | 0.0 |
| | (Mouse), 844 aa. | 30 . . . 839 | 632/811 (77%) | |

[0368] PFam analysis predicts that the NOV2a protein contains the domains shown in the Table 2F.

TABLE 2F
Domain Analysis of NOV2a

| | | Identities/ | |
|---|---|---|---|
| Pfam | | Similarities | Expect |
| Domain | NOV2a Match Region | for the Matched Region | Value |
| Sema | 327 . . . 738 | 217/491 (44%) | 7e−202 |
| | | 372/491 (76%) | |
| PSI | 756 . . . 803 | 18/67 (27%) | 2.5e−14 |
| | | 40/67 (60%) | |
| tsp_1 | 869 . . . 920 | 23/54 (43%) | 3.5e−12 |
| | | 38/54 (70%) | |
| tsp_1 | 927 . . . 971 | 17/53 (32%) | 4.3e−06 |
| | | 31/53 (58%) | |
| tsp_1 | 1058 . . . 1108 | 24/53 (45%) | 9.1e−11 |
| | | 34/53 (64%) | |
| tsp_1 | 1115 . . . 1165 | 23/53 (43%) | 5.9e−08 |
| | | 35/53 (66%) | |
| tsp_1 | 1170 . . . 1210 | 17/53 (32%) | 0.0034 |
| | | 27/53 (51%) | |

### Example 3

[0369] The NOV3 clone was analyzed, and the nucleotide and encoded polypeptide sequences are shown in Table 3A.

TABLE 3A
NOV3 Sequence Analysis

| | | |
|---|---|---|
| NOV3a, CG121295-01 | SEQ ID NO: 23 | 750 bp |
| DNA Sequence | ORF Start: ATG at 41 | ORF Stop: TGA at 701 |

TTCAGTTTGAACGGGAGGTTTTTGATCCCTTTTTTTCAGAATGGATTATTTGCTCATGATTTTCTCTCTGCTG
TTTGTGGCTTGCCAAGGAGCTCCAGAAACAGCAGTCTTAGGCGCTGAGCTCAGCGCGGTGGGTGAGAACGGCG
GGGAGAAACCCACTCCCAGTCCACCCTGGCGGCTCCGCCGGTCCAAGCGCTGCTCCTGCTCGTCCCTGATGGA
TAAAGAGTGTGTCTACTTCTGCCACCTGGACATCATTTGGGTCAACACTCCCGATTTCTTTCTCTCTTTGGAT
AATAGGCACGTTGTTCCGTATGGACTTGGAAGCCCTAGGTCCAAGAGAGCCTTGGAGAATTTACTTCCCACAA
AGGCAACAGACCGTGAGAATAGATGCCAATGTGCTAGCCAAAAAGACAAGAAGTGCTGGAATTTTTGCCAAGC
AGGAAAAGAACTCAGGGCTGAAGACATTATGGAGAAAGACTGGAATAATCATAAGAAAGGAAAAGACTGTTCC
AAGCTTGGGAAAAAGTGTATTTATCAGCAGTTAGTGAGAGGAAGAAAAATCAGAAGAAGTTCAGAGGAACACC
TAAGACAAACCAGGTCGGAGACCATGAGAAACAGCGTCAAATCATCTTTTCATGATCCCAAGCTGAAAGGCAA
GCCCTCCAGAGAGCGTTATGTGACCCACAACCGAGCACATTGGTGACAGACCTTCGGGGCCTGTCTGAAGCCA
TAGCCTCCACGGAGAGCCCT

| | | | |
|---|---|---|---|
| NOV3a, CG121295-01 | | | |
| Protein Sequence | SEQ ID NO: 24 | 220 aa | MW at 25403.9kD |

MDYLLMIFSLLFVACQGAPETAVLGAELSAVGENGGEKPTPSPPWRLRRSKRCSCSSLMDKECVYFCHLDIIW
VNTPDFFLSLDNRHVVPYGLGSPRSKRALENLLPTKATDRENRCQCASQKDKKCWNFCQAGKELRAEDIMEKD
WNNHKKGKDCSKLGKKCIYQQLVRGRKIRRSSEEHLRQTRSETMRNSVKSSFHDPKLKGKPSRERYVTHNRAH
W

[0370] Further analysis of the NOV3a protein yielded the following properties shown in Table 3B.

TABLE 3B
Protein Sequence Properties NOV3a

| SignalP | Cleavage site between residues 18 and 19 | | | |
|---|---|---|---|---|
| analysis: | | | | |
| PSORT II | PSG: a new signal peptide prediction method | | | |
| analysis: | N-region: length 2; pos. chg 0; neg. chg 1 | | | |
| | H-region: length 17; peak value 0.00 | | | |
| | PSG score: −4.40 | | | |
| | GvH: von Heijne's method for signal seq. recognition | | | |
| | GvH score (threshold: −2.1): 1.68 | | | |
| | possible cleavage site: between 17 and 18 | | | |
| | >>> Seems to have no N-terminal signal peptide | | | |
| | ALOM: Klein et al's method for TM region allocation | | | |
| | Init position for calculation: 1 | | | |
| | Tentative number of TMS(s) for the threshold 0.5: 1 | | | |
| | Number of TMS(s) for threshold 0.5: 0 | | | |
| | PERIPHERAL | Likelihood = 6.31 (at 67) | | |
| | ALOM score: −1.59 (number of TMSs: 0) | | | |
| | MITDISC: discrimination of mitochondrial targeting seq | | | |
| | R content: | 0 | Hyd Moment (75): | 4.56 |
| | Hyd Moment (95): | 7.21 | G content: | 1 |
| | D/E content: | 2 | S/T content: | 1 |

```
Score: −7.31
Gavel: prediction of cleavage sites for mitochondrial preseq
cleavage site motif not found
NUCDISC: discrimination of nuclear localization signals
pat4: none
pat7: PPWRLRR (3) at 43
pat7: PWRLRRS (4) at 44
pat7: PRSKRAL (5) at 96
bipartite: KKCIYQQLVRGRKIRRS at 161
content of basic residues: 18.6%
NLS Score: 1.05
KDEL: ER retention motif in the C-terminus: none
ER Membrane Retention Signals: none
SKL: peroxisomal targeting signal in the C-terminus: none
PTS2: 2nd peroxisomal targeting signal: none
VAC: possible vacuolar targeting motif: none
RNA-binding motif: none
Actinin-type actin-binding motif:
type 1: none
type 2: none
NMYR: N-myristoylation pattern: none
Prenylation motif: none
memYQRL: transport motif from cell surface to Golgi: none
Tyrosines in the tail: none
Dileucine motif in the tail: none
checking 63 PROSITE DNA binding motifs: none
checking 71 PROSITE ribosomal protein motifs: none
checking 33 PROSITE prokaryotic DNA binding motifs: none
NNCN: Reinhardt's method for Cytoplasmic/Nuclear discrimination
Prediction: nuclear
Reliability: 94.1
COIL: Lupas's algorithm to detect coiled-coil regions
total: 0 residues
Final Results (k = 9/23):
69.6%: nuclear
13.0%: mitochondrial
  8.7%: extracellular, including cell wall
  8.7%: cytoplasmic
>> prediction for CG121295-01 is nuc (k = 23)
```

[0371] A search of the NOV3a protein against the Geneseq database, a proprietary database that contains sequences published in patents and patent publication, yielded several homologous proteins shown in Table 3C.

TABLE 3C
Geneseq Results for NOV3a

| | | NOV3a | Identities/ | |
|---|---|---|---|---|
| | | Residues/ | Similarities for | |
| Geneseq | Protein/Organism/Length [Patent #, | Match | the Matched | Expect |
| Identifier | Date] | Residues | Region | Value |
| ABU03518 | Angiogenesis-associated human protein | 1 . . . 220 | 211/220 (95%) | e−125 |
| | sequence #63 - Homo sapiens, 212 aa. | 1 . . . 212 | 212/220 (95%) | |
| | [WO200279492-A2, 10 OCT. 2002] | | | |
| ABP65215 | Hypoxia-regulated protein #89 - Homo | 1 . . . 220 | 211/220 (95%) | e−125 |
| | sapiens, 212 aa. [WO200246465-A2, | 1 . . . 212 | 212/220 (95%) | |
| | 13 JUN. 2002] | | | |
| AAG64862 | Heart muscle cell differentiation related | 1 . . . 220 | 211/220 (95%) | e−125 |
| | protein SEQ ID NO: 65 - Homo | 1 . . . 212 | 212/220 (95%) | |
| | sapiens, 212 aa. [WO200148151-A1, | | | |
| | 05 JUL. 2001] | | | |
| AAB99933 | Human ET1 protein sequence SEQ ID | 1 . . . 220 | 211/220 (95%) | e−125 |
| | NO: 65 - Homo sapiens, 212 aa. | 1 . . . 212 | 212/220 (95%) | |
| | [WO200148150-A1, 05 JUL. 2001] | | | |
| AAB00197 | Preproendothelin-1 - Homo sapiens, | 1 . . . 220 | 211/220 (95%) | e−125 |
| | 212 aa. [WO200055314-A2, | 1 . . . 212 | 212/220 (95%) | |
| | 21 SEP. 2000] | | | |

[0372] In a BLAST search of public sequence databases, the NOV3a protein was found to have homology to the proteins shown in the BLASTP data in Table 3D.

TABLE 3D
Public BLASTP Results for NOV3a

| | | NOV3a | | |
|---|---|---|---|---|
| Protein | | Residues/ | Identities/ | |
| Accession | | Match | Similarities for the | Expect |
| Number | Protein/Organism/Length | Residues | Matched Portion | Value |
| P05305 | Endothelin-1 precursor (ET-1) - | 1 . . . 220 | 211/220 (95%) | e−124 |
| | Homo sapiens (Human), 212 aa. | 1 . . . 212 | 212/220 (95%) | |
| P17322 | Endothelin-1 precursor (ET-1) - | 1 . . . 219 | 148/220 (67%) | 3e−80 |
| | Bos taurus (Bovine), 202 aa. | 1 . . . 202 | 167/220 (75%) | |
| P09558 | Endothelin-1 precursor (ET-1) - Sus | 1 . . . 219 | 145/221 (65%) | 7e−78 |
| | scrofa (Pig), 203 aa. | 1 . . . 203 | 168/221 (75%) | |
| P22387 | Endothelin-1 precursor (ET-1) - | 1 . . . 219 | 147/220 (66%) | 1e−77 |
| | Mus musculus (Mouse), 202 aa. | 1 . . . 202 | 165/220 (74%) | |
| Q9BG76 | Preproendothelin-1 - Ovis aries | 1 . . . 219 | 142/220 (64%) | 9e−76 |
| | (Sheep), 202 aa. | 1 . . . 202 | 164/220 (74%) | |

[0373] PFam analysis predicts that the NOV3a protein contains the domains shown in the Table 3E.

TABLE 3E
Domain Analysis of NOV3a

| | | Identities/ | |
|---|---|---|---|
| | NOV3a Match | Similarities | Expect |
| Pfam Domain | Region | for the Matched Region | Value |
| endothelin | 48 . . . 78 | 26/31 (84%) | 8.6e−20 |
| | | 31/31 (100%) | |

### Example 4

[0374] The NOV4 clone was analyzed, and the nucleotide and encoded polypeptide sequences are shown in Table 4A.

TABLE 4A
NOV4 Sequence Analysis

| | | |
|---|---|---|
| NOV4a, CG124756-01 | SEQ ID NO: 25 | 1076 bp |
| DNA Sequence | ORF Start: ATG at 75 | ORF Stop: TGA at 834 |

GGCTCCTGGTCCCACTGCTGCTCAGCCCAGTGGCCTCACAGGACACCAGCTTCCCAGGAGGCGTCTGACACAG
TATGATGATGAAGATCCCATGGGGCAGCATCCCAGTACTGATGTTGCTCCTGCTCCTGGGCCTAATCGATATC
TCCCAGGCCCAGCTCAGCTGCACCGGGCCCCCAGCCATCCCTGGCATCCCGGGTATCCCTGGGACACCTGGCC
CCGATGGCCAACCTGGGACCCCAGGGATAAAAGGAGAGAAAGGGCTTCCAGGGCTGGCTGGAGACCATGGTGA
GTTCGGAGAGAAGGGAGACCCAGGGATTCCTGGGAATCCAGGAAAAGTCGGCCCCAAGGGCCCCATGGGCCCT
AAAGGTGGCCCAGGGGCCCCTGGAGCCCCAGGCCCCAAAGGTGAATCGGGAGACTACAAGGCCACCCAGAAAA
TCGCCTTCTCTGCCACAAGAACCATCAACGTCCCCCTGCGCCGGGACCAGACCATCCGCTTCGACCACGTGAT
CACCAACATGAACAACAATTATGAGCCCCGCAGTGGCAAGTTCACCTGCAAGGTGCCCGGTCTCTACTACTTC
ACCTACCACGCCAGCTCTCGAGGGAACCTGTGCGTGAACCTCATGCGTGGCCGGGAGCGTGCACAGAAGGTGG
TCACCTTCTGTGACTATGCCTACAACACCTTCCAGGTCACCACCGGTGGCATGGTCCTCAAGCTGGAGCAGGG
GGAGAACGTCTTCCTGCAGGCCACCGACAAGAACTCACTACTGGGCATGGAGGGTGCCAACAGCATCTTTTCC
GGGTTCCTGCTCTTTCCAGATATGGAGGCCTGACCTGTGGGCTGCTTCACATCCACCCCGGCTCCCCCTGCCA
GCAACGCTCACTCTACCCCCAACACCACCCCTTGCCCAGCCAATGCACACAGTAGGGCTTGGTGAATGCTGCT
GAGTGAATGAGTAAATAAACTCTTCAAGGCCAAGGGAAAAAAAAAAAAAAAAAAAAAAAAAAAAAAAAAAAAA
AAAAAAAAAAAAAAAAAAAAAAAAAAAAAAAAAAAAAAAAAAAAAAAAAAAAAA

| | | | |
|---|---|---|---|
| NOV4a, CG124756-01 | | | |
| Protein Sequence | SEQ ID NO: 26 | 253 aa | MW at 26721.5kD |

MMMKIPWGSIPVLMLLLLLGLIDISQAQLSCTGPPAIPGIPGIPGTPGPDGQPGTPGIKGEKGLPGLAGDHGE
FGEKGDPGIPGNPGKVGPKGPMGPKGGPGAPGAPGPKGESGDYKATQKIAFSATRTINVPLRRDQTIRFDHVI
TNMNNNYEPRSGKFTCKVPGLYYFTYHASSRGNLCVNLMRGRERAQKVVTFCDYAYNTFQVTTGGMVLKLEQG
ENVFLQATDKNSLLGMEGANSIFSGFLLFPDMEA

| | | |
|---|---|---|
| NOV4b, CG124756-02 | SEQ ID NO: 27 | 816 bp |
| DNA Sequence | ORF Start: ATG at 48 | ORF Stop: TGA at 807 |

GTGGTAACCTTCACATTGTCTTCTCCACAGGAGGCGTCTGACACAGTATGATGATGAAGATCCCATGGGGCAG
CATCCCAGTACTGATGTTGCTCCTGCTCCTGGGCCTAATCGATATCTCCCAGGCCCAGCTCAGCTGCACCGGG
CCCCCAGCCATCCCTGGCATCCCGGGTATCCCTGGGACACCTGGCCCCGATGGCCAACCTGGGACCCCAGGGA
TAAAAGGAGAGAAAGGGCTTCCAGGGCTGGCTGGAGACCATGGTGAGTTCGGAGAGAAGGGAGACCCAGGGAT
TCCTGGGAATCCAGGAAAAGTCGGCCCCAAGGGCCCCATGGGCCCTAAAGGTGGCCCAGGGGCCCCTGGAGCC
CCAGGCCCCAAAGGTGAATCGGGAGACTACAAGGCCACCCAGAAAATCGCCTTCTCTGCCACAAGAACCATCA
ACGTCCCCCTGCGCCGGGACCAGACCATCCGCTTCGACCACGTGATCACCAACATGAACAACAATTATGAGCC
CCGCAGTGGCAAGTTCACCTGCAAGGTGCCCGGTCTCTACTACTTCACCTACCACGCCAGCTCTCGAGGGAAC
CTGTGCGTGAACCTCATGCGTGGCCGGGAGCGTGCACAGAAGGTGGTCACCTTCTGTGACTATGCCTACAACA
CCTTCCAGGTCACCACCGGTGCCATGGTCCTCAAGCTGGAGCAGGGGGAGAACGTCTTCCTGCAGGCCACCGA
CAAGAACTCACTACTGGGCATGGAGGGTGCCAACAGCATCTTTTCCGGGTTCCTGCTCTTTCCAGATATGGAG
GCCTGACCTGTGG

| | | | |
|---|---|---|---|
| NOV4b, CG124756-02 | | | |
| Protein Sequence | SEQ ID NO: 28 | 253 aa | MW at 26721.5kD |

MMMKIPWGSIPVLMLLLLLGLIDISQAQLSCTGPPAIPGIPGIPGTPGPDGQPGTPGIKGEKGLPGLAGDHGE
FGEKGDPGIPGNPGKVGPKGPMGPKGGPGAPGAPGPKGESGDYKATQKIAFSATRTINVPLRRDQTIRFDHVI
TNMNNNYEPRSGKFTCKVPGLYYFTYHASSRGNLCVNLMRGRERAQKVVTFCDYAYNTFQVTTGGMVLKLEQG
ENVFLQATDKNSLLGMEGANSIFSGFLLFPDMEA

| | | |
|---|---|---|
| | SEQ ID NO: 29 | 1076 bp |
| NOV4c, SNP13382475 of | ORF Start: ATG at 75 | ORF Stop: TGA at 834 |
| CG124756-01, DNA Sequence | SNP Pos: 302 | SNP Change: G to T |

GGCTCCTGGTCCCACTGCTGCTCAGCCCAGTGGCCTCACAGGACACCAGCTTCCCAGGAGGCGTCTGACACAG
TATGATGATGAAGATCCCATGGGGCAGCATCCCAGTACTGATGTTGCTCCTGCTCCTGGGCCTAATCGATATC
TCCCAGGCCCAGCTCAGCTGCACCGGGCCCCCAGCCATCCCTGGCATCCCGGGTATCCCTGGGACACCTGGCC
CCGATGGCCAACCTGGGACCCCAGGGATAAAAGGAGAGAAAGGGCTTCCAGGGCTGGCTGGAGACCATGGTGA
GTTCGGAGATAAGGGAGACCCAGGGATTCCTGGGAATCCAGGAAAAGTCGGCCCCAAGGGCCCCATGGGCCCT
AAAGGTGGCCCAGGGGCCCCTGGAGCCCCAGGCCCCAAAGGTGAATCGGGAGACTACAAGGCCACCCAGAAAA
TCGCCTTCTCTGCCACAAGAACCATCAACGTCCCCCTGCGCCGGGACCAGACCATCCGCTTCGACCACGTGAT
CACCAACATGAACAACAATTATGAGCCCCGCAGTGGCAAGTTCACCTGCAAGGTGCCCGGTCTCTACTACTTC
ACCTACCACGCCAGCTCTCGAGGGAACCTGTGCGTGAACCTCATGCGTGGCCGGGAGCGTGCACAGAAGGTGG
TCACCTTCTGTGACTATGCCTACAACACCTTCCAGGTCACCACCGGTGGCATGGTCCTCAAGCTGGAGCAGGG
GGAGAACGTCTTCCTGCAGGCCACCGACAAGAACTCACTACTGGGCATGGAGGGTGCCAACAGCATCTTTTCC
GGGTTCCTGCTCTTTCCAGATATGGAGGCCTGACCTGTGGGCTGCTTCACATCCACCCCGGCTCCCCCTGCCA
GCAACGCTCACTCTACCCCCAACACCACCCCTTGCCCAGCCAATGCACACAGTAGGGCTTGGTGAATGCTGCT
GAGTGAATGAGTAAATAAACTCTTCAAGGCCAAGGGAAAAAAAAAAAAAAAAAAAAAAAAAAAAAAAAAAAAA
AAAAAAAAAAAAAAAAAAAAAAAAAAAAAAAAAAAAAAAAAAAAAAAAAAAAAA

| | | | |
|---|---|---|---|
| NOV4c, SNP13382475 of | SEQ ID NO: 30 | | MW at 26707.5kD |
| CG124756-01, Protein Sequence | SNP Pos: 76 | 253 aa | SNP Change: Glu to Asp |

MMMKIPWGSIPVLMLLLLLGLIDISQAQLSCTGPPAIPGIPGIPGTPGPDGQPGTPGIKGEKGLPGLAGDHGE
FGDKGDPGIPGNPGKVGPKGPMGPKGGPGAPGAPGPKGESGDYKATQKIAFSATRTINVPLRRDQTIRFDHVI
TNMNNNYEPRSGKFTCKVPGLYYFTYHASSRGNLCVNLMRGRERAQKVVTFCDYAYNTFQVTTGGMVLKLEQG
ENVFLQATDKNSLLGMEGANSIFSGFLLFPDMEA

| | | |
|---|---|---|
| | SEQ ID NO: 31 | 1076 bp |
| NOV4d, SNP13382476 of | ORF Start: ATG at 75 | ORF Stop: TGA at 834 |
| CG124756-01, DNA Sequence | SNP Pos: 433 | SNP Change: A to G |

GGCTCCTGGTCCCACTGCTGCTCAGCCCAGTGGCCTCACAGGACACCAGCTTCCCAGGAGGCGTCTGACACAG
TATGATGATGAAGATCCCATGGGGCAGCATCCCAGTACTGATGTTGCTCCTGCTCCTGGGCCTAATCGATATC
TCCCAGGCCCAGCTCAGCTGCACCGGGCCCCCAGCCATCCCTGGCATCCCGGGTATCCCTGGGACACCTGGCC
CCGATGGCCAACCTGGGACCCCAGGGATAAAAGGAGAGAAAGGGCTTCCAGGGCTGGCTGGAGACCATGGTGA
GTTCGGAGAGAAGGGAGACCCAGGGATTCCTGGGAATCCAGGAAAAGTCGGCCCCAAGGGCCCCATGGGCCCT
AAAGGTGGCCCAGGGGCCCCTGGAGCCCCAGGCCCCAAAGGTGAATCGGGAGACTACAAGGCCACCCGGAAAA
TCGCCTTCTCTGCCACAAGAACCATCAACGTCCCCCTGCGCCGGGACCAGACCATCCGCTTCGACCACGTGAT
CACCAACATGAACAACAATTATGAGCCCCGCAGTGGCAAGTTCACCTGCAAGGTGCCCGGTCTCTACTACTTC
ACCTACCACGCCAGCTCTCGAGGGAACCTGTGCGTGAACCTCATGCGTGGCCGGGAGCGTGCACAGAAGGTGG
TCACCTTCTGTGACTATGCCTACAACACCTTCCAGGTCACCACCGGTGGCATGGTCCTCAAGCTGGAGCAGGG
GGAGAACGTCTTCCTGCAGGCCACCGACAAGAACTCACTACTGGGCATGGAGGGTGCCAACAGCATCTTTTCC
GGGTTCCTGCTCTTTCCAGATATGGAGGCCTGACCTGTGGGCTGCTTCACATCCACCCCGGCTCCCCCTGCCA
GCAACGCTCACTCTACCCCCAACACCACCCCTTGCCCAGCCAATGCACACAGTAGGGCTTGGTGAATGCTGCT
GAGTGAATGAGTAAATAAACTCTTCAAGGCCAAGGGAAAAAAAAAAAAAAAAAAAAAAAAAAAAAAAAAAAAA
AAAAAAAAAAAAAAAAAAAAAAAAAAAAAAAAAAAAAAAAAAAAAAAAAAAAAA

| | | | |
|---|---|---|---|
| NOV4d, SNP13382476 of | SEQ ID NO: 32 | | MW at 26749.6kD |
| CG124756-01, Protein Sequence | SNP Pos: 120 | 253 aa | SNP Change: Gln to Arg |

MMMKIPWGSIPVLMLLLLLGLIDISQAQLSCTGPPAIPGIPGIPGTPGPDGQPGTPGIKGEKGLPGLAGDHGE
FGEKGDPGIPGNPGKVGPKGPMGPKGGPGAPGAPGPKGESCDYKATRKIAFSATRTINVPLRRDQTIRFDHVI
TNMNNNYEPRSGKFTCKVPGLYYFTYHASSRGNLCVNLMRGRERAQKVVTFCDYAYNTFQVTTGGMVLKLEQG
ENVFLQATDKNSLLGMEGANSIFSGFLLFPDMEA

[0375] A ClustalW comparison of the above protein sequences yields the following sequence alignment shown in Table 4B.

TABLE 4B

| Comparison of the NOV4 protein sequences. | |
|---|---|
| NOV4a | MMMKIPWGSIPVLMLLLLLGLIDISQAQLSCTGPPAIPGIPGIPGTPGPDGQPGTPGIKG |
| NOV4b | MMMKIPWGSIPVLMLLLLLGLIDISQAQLSCTGPPAIPGIPGIPGTPGPDGQPGTPGIKG |
| NOV4a | EKGLPGLAGDHGEFGEKGDPGIPGNPGKVGPKGPMGPKGGPGAPGAPGPKGESGDYKATQ |
| NOV4b | EKGLPGLAGDHGEFGEKGDPGIPGNPGKVGPKGPMGPKGGPGAPGAPGPKGESGDYKATQ |
| NOV4a | KIAFSATRTINVPLRRDQTIRFDHVITNMNNNYEPRSGKFTCKVPGLYYFTYHASSRGNL |
| NOV4b | KIAFSATRTINVPLRRDQTIRFDHVITNMNNNYEPRSGKFTCKVPGLYYFTYHASSRGNL |
| NOV4a | CVNLMRGRERAQKVVTFCDYAYNTFQVTTGGMVLKLEQGENVFLQATDKNSLLGMEGANS |
| NOV4b | CVNLMRGRERAQKVVTFCDYAYNTFQVTTGGMVLKLEQGENVFLQATDKNSLLGMEGANS |
| NOV4a | IFSGFLLFPDMEA |
| NOV4b | IFSGFLLFPDMEA |
| NOV4a | (SEQ ID NO: 26) |
| NOV4b | (SEQ ID NO: 28) |

[0376] Further analysis of the NOV4a protein yielded the following properties shown in Table 4C.

TABLE 4C
Protein Sequence Properties NOV4a

| SignalP | Cleavage site between residues 28 and 29 | | | |
|---|---|---|---|---|
| analysis: | | | | |
| PSORT II | PSG: a new signal peptide prediction method | | | |
| analysis: | N-region: length 4; pos. chg 1; neg. chg 0 | | | |
| | H-region: length 18; peak value 11.91 | | | |
| | PSG score: 7.51 | | | |
| | GvH: von Heijne's method for signal seq. recognition | | | |
| | GvH score (threshold: −2.1): 4.21 | | | |
| | possible cleavage site: between 27 and 28 | | | |
| | >>> Seems to have a cleavable signal peptide (1 to 27) | | | |
| | ALOM: Klein et al's method for TM region allocation | | | |
| | Init position for calculation: 28 | | | |
| | Tentative number of TMS(s) for the threshold 0.5: 0 | | | |
| | number of TMS(s) . . . fixed | | | |
| | PERIPHERAL | Likelihood = 2.60 (at 232) | | |
| | ALOM score: 2.60 (number of TMSs: 0) | | | |
| | MTOP: Prediction of membrane topology (Hartmann et al.) | | | |
| | Center position for calculation: 13 | | | |
| | Charge difference: −3.0 C(−1.0)-N(2.0) | | | |
| | N >= C: N-terminal side will be inside | | | |
| | MITDISC: discrimination of mitochondrial targeting seq | | | |
| | R content: | 0 | Hyd Moment(75): | 6.93 |
| | Hyd Moment(95): | 5.45 | G content: | 2 |
| | D/E content: | 1 | S/T content: | 1 |

Score: −5.61
Gavel: prediction of cleavage sites for mitochondrial preseq
cleavage site motif not found
NUCDISC: discrimination of nuclear localization signals
pat4: none
pat7: none
bipartite: none
content of basic residues: 9.5%
NLS Score: −0.47
KDEL: ER retention motif in the C-terminus: none
ER Membrane Retention Signals: none
SKL: peroxisomal targeting signal in the C-terminus: none
PTS2: 2nd peroxisomal targeting signal: none
VAC: possible vacuolar targeting motif: none
RNA-binding motif: none
Actinin-type actin-binding motif:
type 1: none
type 2: none
NMYR: N-myristoylation pattern: none
Prenylation motif: none
memYQRL: transport motif from cell surface to Golgi: none
Tyrosines in the tail: none
Dileucine motif in the tail: none
checking 63 PROSITE DNA binding motifs: none
checking 71 PROSITE ribosomal protein motifs: none
checking 33 PROSITE prokaryotic DNA binding motifs: none
NNCN: Reinhardt's method for Cytoplasmic/Nuclear discrimination
Prediction: cytoplasmic
Reliability: 76.7
COIL: Lupas's algorithm to detect coiled-coil regions
total: 0 residues
Final Results (k = 9/23):
22.2%: extracellular, including cell wall
22.2%: vacuolar
22.2%: mitochondrial
22.2%: endoplasmic reticulum
11.1%: Golgi
>> prediction for CG124756-01 is exc (k = 9)

[0377] A search of the NOV4a protein against the Geneseq database, a proprietary database that contains sequences published in patents and patent publication, yielded several homologous proteins shown in Table 4D.

TABLE 4D
Geneseq Results for NOV4a

| | | NOV4a | Identities/ | |
|---|---|---|---|---|
| | | Residues/ | Similarities for | |
| Geneseq | Protein/Organism/Length [Patent #, | Match | the Matched | Expect |
| Identifier | Date] | Residues | Region | Value |
| AAM40607 | Human polypeptide SEQ ID NO 5538 - | 1 . . . 253 | 253/253 (100%) | e−151 |
| | Homo sapiens, 255 aa. | 3 . . . 255 | 253/253 (100%) | |
| | [WO200153312-A1, 26 JUL. 2001] | | | |
| AAM38821 | Human polypeptide SEQ ID NO 1966 - | 1 . . . 253 | 253/253 (100%) | e−151 |
| | Homo sapiens, 253 aa. | 1 . . . 253 | 253/253 (100%) | |
| | [WO200153312-A1, 26 JUL. 2001] | | | |
| ABB57231 | Mouse ischaemic condition related | 3 . . . 253 | 201/253 (79%) | e−117 |
| | protein sequence SEQ ID NO: 599 - | 1 . . . 253 | 218/253 (85%) | |
| | Mus musculus, 253 aa. | | | |
| | [WO200188188-A2, 22 NOV. 2001] | | | |
| AAU32411 | Novel human secreted protein #2902 - | 1 . . . 248 | 203/267 (76%) | e−103 |
| | Homo sapiens, 309 aa. | 3 . . . 269 | 212/267 (79%) | |
| | [WO200179449-A2, 25 OCT. 2001] | | | |
| AAU30709 | Novel human secreted protein #1200 - | 23 . . . 248 | 195/243 (80%) | e−102 |
| | Homo sapiens, 287 aa. | 2 . . . 244 | 199/243 (81%) | |
| | [WO200179449-A2, 25 OCT. 2001] | | | |

[0378] In a BLAST search of public sequence databases, the NOV4a protein was found to have homology to the proteins shown in the BLASTP data in Table 4E.

TABLE 4E
Public BLASTP Results for NOV4a

| | | NOV4a | | |
|---|---|---|---|---|
| Protein | | Residues/ | Identities/ | |
| Accession | | Match | Similarities for the | Expect |
| Number | Protein/Organism/Length | Residues | Matched Portion | Value |
| C1HUQB | complement subcomponent C1q | 1 . . . 253 | 253/253 (100%) | e−151 |
| | chain B precursor [validated] - | 1 . . . 253 | 253/253 (100%) | |
| | human, 253 aa. | | | |
| P02746 | Complement C1q subcomponent, B | 3 . . . 253 | 251/251 (100%) | e−150 |
| | chain precursor - Homo sapiens | 1 . . . 251 | 251/251 (100%) | |
| | (Human), 251 aa. | | | |
| P14106 | Complement C1q subcomponent, B | 3 . . . 253 | 201/253 (79%) | e−117 |
| | chain precursor - Mus musculus | 1 . . . 253 | 219/253 (86%) | |
| | (Mouse), 253 aa. | | | |
| I49560 | complement C1q B chain precursor - | 3 . . . 253 | 201/253 (79%) | e−117 |
| | mouse, 253 aa. | 1 . . . 253 | 218/253 (85%) | |
| P31721 | Complement C1q subcomponent, B | 3 . . . 252 | 197/252 (78%) | e−115 |
| | chain precursor - Rattus norvegicus | 1 . . . 252 | 217/252 (85%) | |
| | (Rat), 253 aa. | | | |

[0379] PFam analysis predicts that the NOV4a protein contains the domains shown in the Table 4F.

TABLE 4F
Domain Analysis of NOV4a

| | | Identities/ | |
|---|---|---|---|
| | NOV4a Match | Similarities | Expect |
| Pfam Domain | Region | for the Matched Region | Value |
| Collagen | 51 . . . 110 | 35/60 (58%) | 8.7e−09 |
| | | 45/60 (75%) | |
| C1q | 123 . . . 247 | 69/138 (50%) | 2.4e−72 |
| | | 124/138 (90%) | |

### Example 5

[0380] The NOV5 clone was analyzed, and the nucleotide and encoded polypeptide sequences are shown in Table 5A.

Table 5A
NOV5 Sequence Analysis

| | | |
|---|---|---|
| NOV5a, CG50353-01 | SEQ ID NO: 33 | 1628 bp |
| DNA Sequence | ORF Start: ATG at 1 | ORF Stop: TGA at 1048 |

ATGAACCGGAAAGCGCGGCGCTGCCTGGGCCACCTCTTTCTCAGCCTGGGCATGGTCTGTCTCCTAGCATGTG
GCTTCTCCTCAGTGGTAGCTCTGGGCGCAACGGTCATCTGTAACAAGATCCCAGGCCTGGCTCCCAGACAGCG
GGCGATCTGCCAGAGCCGGCCCGACGCCATCATCGTCATAGGAGAAGGCTCACAAATGGGCCTGGACGAGTGT
CAGTTTCAGTTCCGCAATGGCCGCTGGAACTGCTCTGCACTGGGAGAGCGCACCGTCTTCGGGAAGGAGCTCA
AAGTGGGGAGCCGGGACGGTGCGTTCACCTACGCCATCATTGCCGCCGGCGTGGCCCACGCCATCACAGCTGC
CTGTACCCATGGCAACCTGAGCGACTGTGGCTGCGACAAAGAGAAGCAAGGCCAGTACCACCGGGACGAGGGC
TGGAAGTGGGGTGGCTGCTCTGCCGACATCCGCTACGGCATCGGCTTCGCCAAGGTCTTCGTGGACGCTCGGG
AGATCATGAAGAACGCGCGGCGCCTCATGAACCTGCATAACAATGAGGCCGGCAGGAAGGTTCTAGAGGACCG
GATGCAGCTGGAGTGCAAGTGCCACGGCGTGTCTGGCTCCTGCACCACCAAAACCTGCTGGACCACGCTGCCC
AAGTTCCGAGAGGTGGGCCACCTGCTGAAGGAGAAGTACAACGCGGCCGTGCAGGTGGAGGTGGTGCGGGCCA
GCCGTCTGCGGCAGCCCACCTTCCTGCGCATCAAACAGCTGCGCAGCTATCGCAAGCCCATGAAGACGGACCT
GGTGTACATCGAGAAGTCGCCCAACTACTGCGAGGAGGACCCGGTGACCGGCAGTGTGGGCACGCAGGGCCGC
GCCTGCAACAAGACGGCTCCCCAGGCCAGCGGCTGTGACCTCATGTGCTGTGGGCGTGGCTACAACACCCACC
AGTACGCCCGCGTGTGGCAGTGCAACTGTAAGTTCCACTGGTGCTGCTATGTCAAGTGCAACACGTGCAGCGA
GCGCACGGAGATGTACACGTGCAAGTGAGCCCCGTGTGCACACCACCCTCCCGCTGCAAGTCAGATTGCTGGG
AGGACTGGACCGTTTCCAAGCTGCGGGCTCCCTGGCAGGATGCTGAGCTTGTCTTTTCTGCTGAGGAGGGTAC
TTTTCCTGGGTTTCCTGCAGGCATCCGTGGGGGAAAAAAAATCTCTCAGAGCCCTCAACTATTCTGTTCCACA
CCCAATGCTGCTCCACCCTCCCCCAGACACAGCCCAGGTCCCTCCGCGGCTGGAGCGAAGCCTTCTGCAGCAG
GAACTCTGGACCCCTGGGCCTCATCACAGCAATATTTAACAATTTATTCTGATAAAAATAATATTAATTTATT
TAATTAAAAAGAATTCTTCCACCTCGTCGGGATCCGTTTTCTGCAATCAAAGTGGACTGCTTGCTTTCCTAGC
AGGATGATTTTGTTGCTAGGACAAGGAGCCGTGTAGAAGTGTACATAACTATTCTTTATGCAGATATTTCTAC
TAGCTGATTTTGCAGGTACCCACCTTGCAGCACTAGATGTTTAAGTACAAGAGGAGACATCTTTTATGCATAT
ATAGATATACACACACGAAAAA

| | | | |
|---|---|---|---|
| NOV5a, CG50353-01 | | | |
| Protein Sequence | SEQ ID NO: 34 | 349 aa | MW at 38980.7kD |

MNRKARRCLGHLFLSLGMVCLLACGFSSVVALGATVICNKIPGLAPRQRAICQSRPDAIIVIGEGSQMGLDEC
QFQFRNGRWNCSALGERTVFGKELKVGSRDGAFTYAIIAAGVAHAITAACTHGNLSDCGCDKEKQGQYHRDEG
WKWGGCSADIRYGIGFAKVFVDAREIMKNARRLMNLHNNEAGRKVLEDRMQLECKCHGVSGSCTTKTCWTTLP
KFREVGHLLKEKYNAAVQVEVVRASRLRQPTFLRIKQLRSYRKPMKTDLVYIEKSPNYCEEDPVTGSVGTQGR
ACNKTAPQASGCDLMCCGRGYNTHQYARVWQCNCKFHWCCYVKCNTCSERTEMYTCK

| | | |
|---|---|---|
| NOV5b, 228753443 | SEQ ID NO: 35 | 966 bp |
| DNA Sequence | ORF Start: at 1 | ORF Stop: end of sequence |

AGATCTCTGGGCGCAACGGTCATCTGTAACAAGATCCCAGGCCTGGCTCCCAGACAGCGGGCGATCTGCCAGA
GCCGGCCCGACGCCATCATCGTCATAGGAGAAGGCTCACAAATGGGCCTGGACGAGTGTCAGTTTCAGTTCCG
CAATGGCCGCTGGAACTGCTCTGCACTGGGAGAGCGCACCGTCTTCGGGAAGGAGCTCAAAGTGGGGAGCCGG
GAGGCTGCATTCACCTACGCCATCATTGCCGCCGGCGTGGCCCACGCCATCACAGCTGCCTGTACCCAGGGCA
ACCTGAGCGACTGTGGCTGCGACAAAGAGAAGCAAGGCCAGTACCACCGGGACGAGGGCTGGAAGTGGGGTGG
CTGCTCCGCCGACATCCGCTACGGCATCGGCTTCGCCAAGGTCTTTGTGGATGCCCGGGAGATCAAGCAGAAT
GCCCGGACTCTCATGAACTTGCACAACAACGAGGCAGGCCGAAAGATCCTGGAGGAGAACATGAAGCTGGAAT
GTAAGTGCCACGGCGTGTCAGGCTCGTGCACCACCAAGACGTGCTGGACCACACTGCCACAGTTTCGGGAGCT
GGGTACGTGCTCAAGGACAAGTACAACGAGGCCGTTCACGTGGAGCCTGTGCGTGCCAGCCGCAACAAGCGG
CCCACCTTCCTGAAGATCAAGAAGCCACTGTCGTACCGCAAGCCCATGGACACGGACCTGGTGTACATCGAGA
AGTCGCCCAACTACTGCGAGGAGGACCCGGTGACCGGCAGTGTGGGCACCCAGGGCCGCGCCTGCAACAAGAC
GGCTCCCCAGGCCAGCGGCTGTGACCTCATGTGCTGTGGGCGTGGCTACAACACCCACCAGTACGCCCGCGTG
TGGCAGTGCAACTGTAAGTTCCACTGGTGCTGCTATGTCAAGTGCAACACGTGCAGCGAGCGCACGGAGATGT
ACACGTGCAAGCTCGAG

| | | | |
|---|---|---|---|
| NOV5b, 228753443 | | | |
| Protein Sequence | SEQ ID NO: 36 | 322 aa | MW at 36054.9kD |

RSLGATVICNKIPGLAPRQRAICQSRPDAIIVIGEGSQMGLDECQFQFRNGRWNCSALGERTVFGKELKVGSR
EAAFTYAIIAAGVAHAITAACTQGNLSDCGCDKEKQGQYHRDEGWKWGGCSADIRYGIGFAKVFVDAREIKQN
ARTLMNLHNNEAGRKILEENMKLECKCHGVSGSCTTKTCWTTLPQFRELGYVLKDKYNEAVHVEPVRASRNKR
PTFLKIKKPLSYRKPMDTDLVYIEKSPNYCEEDPVTGSVGTQGRACNKTAPQASGCDLMCCGRGYNTHQYARV
WQCNCKFHWCCYVKCNTCSERTEMYTCKLE

| | | |
|---|---|---|
| NOV5c, 169475673 | SEQ ID NO: 37 | 966 bp |
| DNA Sequence | ORF Start: at 1 | ORF Stop: end of sequence |

AGATCTCTGGGCGCAACGGTCATCTGTAACAAGATCCCAGGCCTGGCTCCCAGACAGCGGGCGATCTGCCAGA
GCCGGCCCGACGCCATCATCGTCATAGGAGAAGGCTCACAAATGGGCCTCGACGAGTGTCAGTTTCAGTTCCG
CAATGGCCGCTGGAACTGCTCTGCACTGGGAGAGCGCACCGTCTTCGGGAAGGAGCTCAAAGTGGGGAGCCGG
GAGGCTGCGTTCACCTACGCCATCATTGCCGCCGGCGTGGCCCACGCCATCACAGCTGCCTGTACCCAGGGCA
ACCTGAGCGACTGTGGCTGCGACAAAGAGAAGCAAGGCCAGTACCACCGGGACGAGGGCTGGAAGTGGGGTGG
CTGCTCTGCCGACATCCGCTACGGCATCGGCTTCGCCAAGGTCTTTGTGGATGCCCGGGAGATCAAGCAGAAT
GCCCGGACTCTCATGAACTTGCACAACAACGAGGCAGGCCGAAAGATCCTGGAGGAGAACATGAAGCTGGAAT
GTAAGTGCCACGGCGTGTCAGGCTCGTGCACCACCAAGACGTGCTGGACCACACTGCCACAGTTTCGGGAGCT
GGGCTACGTGCTCAAGGACAAGTACAACGAGGCCGTTCACGTGGAGCCTGTGCGTGCCAGCCGCAACAAGCGG
CCCACCTTCCTGAAGATCAAGAAGCCACTGTCGTACCGCAAGCCCATGGACACGGACCTGGTGTACATCGAGA
AGTCGCCCAACTACTGCGAGGAGGACCCGGTGACCGGCAGTGTGGGCACCCAGGGCCGCGCCTGCAACAAGAC
GGCTCCCCAGGCCAGCGGCTGTGACCTCATGTGCTGTGGGCGTGGCTACAACACCCACCAGTACGCCCGCGTG
TGGCAGTGCAACTGTAAGTTCCACTGGTGCTGCTATGTCAAGTGCAACACGTGCAGCGAGCGCACGGAGATGT
ACACGTGCAAGCTCGAG

| | | | |
|---|---|---|---|
| NOV5c, 169475673 | | | |
| Protein Sequence | SEQ ID NO: 38 | 322 aa | MW at 36054.9kD |

RSLGATVICNKIPGLAPRQRAICQSRPDAIIVIGEGSQMGLDECQFQFRNGRWNCSALGERTVFGKELKVGSR
EAAFTYAIIAAGVAHAITAACTQGNLSDCGCDKEKQGQYHRDEGWKWGGCSADIRYGIGFAKVFVDAREIKQN
ARTLMNLHNNEAGRKILEENMKLECKCHGVSGSCTTKTCWTTLPQFRELGYVLKDKYNEAVHVEPVRASRNKR
PTFLKIKKPLSYRKPMDTDLVYIEKSPNYCEEDPVTGSVGTQGRACNKTAPQASGCDLMCCGRGYNTHQYARV
WQCNCKFHWCCYVKCNTCSERTEMYTCKLE

| | | |
|---|---|---|
| NOV5d, 228753459 | SEQ ID NO: 39 | 966 bp |
| DNA Sequence | ORF Start: at 1 | ORF Stop: end of sequence |

AGATCTCTGGGCGCAACGGTCATCTGTAACAAGATCCCAGGCCTGGCTCCCAGACAGCGGGCGATCTGCCAGA
GCCGGCCCGACGCCATCATCGTCATAGGAGAAGGCTCACAAATGGGCCTGGACGAGTGTCAGTTTCAGTTCCG
CAATGGCCGCTGGAACTGCTCTGCACTGGGAGAGCGCACCGTCTTCGGGAAGGAGCTCAAAGTGGGGAGCCGG
GAGGCTGCATTCACCTACGCCATCATTGCCGCCGGCGTGGCCCACGCCATCACAGCTGCCTGTACCCAGGGCA
ACCTGAGCGACTGTGGCTGCGACAAAGAGAAGCAAGGCCAGTACCACCGGGACGAGGGCTGGAAGTGGGGTGG
CTGCTCCGCCGACATCCGCTACGGCATCGGCTTCGCCAAGGTCTTTGTGGATGCCCGGGAGATCAAGCAGAAT
GCCCGGACTCTCATGAACTTGCACAACAACGAGGCAGGCCGAAAGATCCTGGAGGAGAACATGAAGCTGGAAT
GTAAGTGCCACGGCGTGTCAGGCTCGTGCACCACCAAGACGTGCTGGACCACACTGCCACAGTTTCGGGAGCT
GGGCTACGTACTCAAGGACAAGTACAACGAGGCCGTTCACGTGGAGCCTGTGCGTGCCAGCCGCAACAAGCGG
CCCACCTTCCTGAAGATCAAGAAGCCACTGTCGTACCGCAAGCCCATGGACACGGACCTGGTGTACATCGAGA
AGTCGCCCAACTACTGCGAGGAGGACCCGGTGACCGGCAGTGTGGGCACCCAGGGCCGCGCCTGCAACAAGAC
GGCTCCCCAGGCCAGCGGCTGTGACCTCATGTGCTGTGGGCGTGGCTACAACACCCACCAGTACGCCCGCGTG
TGGCAGTGCAACTGTAAGTTCCACTGGTGCTGCTATGTCAAGTGCAACACGTGCAGCGAGCGCACGGAGATGT
ACACGTGCAAGCTCGAG

| | | | |
|---|---|---|---|
| NOV5d, 228753459 | | | |
| Protein Sequence | SEQ ID NO: 40 | 322 aa | MW at 36054.9kD |

RSLGATVICNKIPGLAPRQRAICQSRPDAIIVIGEGSQMGLDECQFQFRNGRWNCSALGERTVFGKELKVGSR
EAAFTYAIIAAGVAHAITAACTQGNLSDCGCDKEKQGQYHRDEGWKWGGCSADIRYGIGFAKVFVDAREIKQN
ARTLMNLHNNEAGRKILEENMKLECKCHGVSGSCTTKTCWTTLPQFRELGYVLKDKYNEAVHVEPVRASRNKR
PTFLKIKKPLSYRKPMDTDLVYIEKSPNYCEEDPVTGSVGTQGRACNKTAPQASGCDLMCCGRGYNTHQYARV
WQCNCKFHWCCYVKCNTCSERTEMYTCKLE

| | | |
|---|---|---|
| NOV5e, 228753462 | SEQ ID NO: 41 | 966 bp |
| DNA Sequence | ORF Start: at 1 | ORF Stop: end of sequence |

AGATCTCTGGGCGCAACGGTCATCTGTAACAAGATCCCAGGCCTGGCTCCCAGACAGCGGGCGATCTGCCAGA
GCCGGCCCGACGCCATCATCGTCATAGGAGAAGGCTCACAAATGGGCCTCGACGAGTGTCAGTTTCAGTTCCG
CAATGGCCGCTGGAACTGCTCTGCACTGGGAGAGCGCACCGTCTTCGGGAAGGAGCTCAAAGTGGGGAGCCGG
GAGGCTGCATTCACCTACGCCATCATTGCCGCCGGCGTGGTCCACGCCATCACAGCTGCCTGTACCCAGGGCA
ACCTGAGCGACTGTGGCTGCGACAAAGAGAAGCAAGGCCAGTACCACCGGGACGAGGGCTGGAAGTGGGGTGG
CTGCTCCGCCGACATCCGCTACGGCATCGGCTTCGCCAAGGTCTTTGTGGATGCCCGGGAGATCAAGCAGAAT
GCCCGGACTCTCATGAACTTGCACAACAACGAGGCAGGCCGAAAGATCCTGGAGGAGAACATGAAGCTGGAAT
GTAAGTGCCACGGCGTGTCAGGCTCGTGCACCACCAAGACGTGCTGGACCACACTGCCACAGTTTCGGGAGCT
GGGCTACGTGCTCAAGGACAAGTACAACGAGGCCGTTCACGTGGAGCCTGTGCGTGCCAGCCGCAACAAGCGG
CCCACCTTCCTGAAGATCAAGAAGCCACTGTCGTACCGCAAGCCCATGGACACGGACCTGGTGTACATCGAGA
AGTCGCCCAACTACTGCGAGGAGGACCCGGTGACCGGCAGTGTGGGCACCCAGGGCCGCGCCTGCAACAAGAC
GGCTCCCCAGGCCAGCGGCTGTGACCTCATGTGCTGTGGGCGTGGCTACAACACCCACCAGTACGCCCGCGTG
TGGCAGTGCAACTGTAAGTTCCACTGGTGCTGCTATGTCAAGTGCAACACGTGCAGCGAGCGCACGGAGATGT
ACACGTGCAAGCTCGAG

| | | | |
|---|---|---|---|
| NOV5e, 22873462 | | | |
| Protein Sequence | SEQ ID NO: 42 | 322 aa | MW at 36083.0kD |

RSLGATVICNKIPGLAPRQRAICQSRPDAIIVIGEGSQMGLDECQFQFRNGRWNCSALGERTVFGKELKVGSR
EAAFTYAIIAAGVVHAITAACTQGNLSDCGCDKEKQGQYHRDEGWKWGGCSADIRYGIGFAKVFVDAREIKQN
ARTLMNLHNNEAGRKILEENMKLECKCHGVSGSCTTKTCWTTLPQFRELGYVLKDKYNEAVHVEPVRASRNKR
PTFLKIKKPLSYRKPMDTDLVYIEKSPNYCEEDPVTGSVGTQGRACNKTAPQASGCDLMCCGRGYNTHQYARV
WQCNCKFHWCCYVKCNTCSERTEMYTCKLE

| | | |
|---|---|---|
| NoV5f, 228753446 | SEQ ID NO: 43 | 985 bp |
| DNA Sequence | ORF Start: at 2 | ORF Stop: end of sequence |

ATCTGCAGAATTCGCCCTTAGATCTCTGGGCGCAACGGTCATCTGTAACAAGATCCCAGGCCTGGCTCCCAGA
CAGCGGGCGATCTGCCAGAGCCGGCCCGACGCCATCATCGTCATAGGAGAAGGCTCACAAATGGGCCTGGACG
AGTGTCAGTTTCAGTTCCGCAATGGCCGCTGGAACTGCTCTGCACTGGGAGAGCGCACCGTCTTCGGGAAGGA
GCTCAAAGTGGGGAGCCGGGAGGCTGCGTTCACCTACGCCATCATTGCCGCCGGCGTGGCCCACGCCATCACA
GCTGCCTGTACCCAGGGCAACCTCAGCGACTGTGGCTGCGACAAAGAGAAGCAAGGCCAGTACCACCGGGACG
AGGGCTGGAAGTGGGGTGGCTGCTCTGCCGACATCCGCTACGGCATCGGCTTCGCCAAGGTCTTTGTGGATGC
CCGGGAGATCAAGCAGAATGCCCGGACTCTCATGAACTTGCACAACAACGAGGCAGGCCGAAAGATCCTGGAG
GAGAACATGAAGCTGGAATGTAAGTGCCACGGCGTGTCAGGCTCGTGCACCACCAAGACGTGCTGGACCACAC
TGCCACAGTTTCGGGAGCTGGGCTACGTGCTCAAGGACAAGTACAACGAGGCCGTTCACGTGGAGCCTGTGCG
TGCCAGCCGCAACAAGCGGCCCACCTTCCTGAAGATCAAGAAGCCACTGTCGTACCGCAAGCCCATGGACACG
GACCTGGTGTACATCGAGAAGTCGCCCAACTACTGCGAGGAGGACCCGGTGACCGGCAGTGTGGGCACCCAGG
GCCGCGCCTGCAACAAGACGGCTCCCCAGGCCAGCGGCTGTGACCTCATGTGCTGTGGGCGTGGCTACAACAC
CCACCAGTACGCCCGCGTGTGGCAGTGCAACTGTAAGTTCCACTGGTGCTACTATGTCAAGTGCAACACGTGC
AGCGAGCGCACGGAGATGTACACGTGCAAGCTCGAG

| | | | |
|---|---|---|---|
| NOV5f, 228753446 | | | |
| Protein Sequence | SEQ ID NO: 44 | 328 aa | MW at 36733.61kD |

SAEFALRSLGATVICNKIPGLAPRQRAICQSRPDAIIVIGEGSQMGLDECQFQFRNGRWNCSALGERTVFGKE
LKVGSREAAFTYAIIAAGVAHAITAACTQGNLSDCGCDKEKQGQYHRDEGWKWGGCSADIRYGIGFAKVFVDA
REIKQNARTLMNLHNNEAGRKILEENMKLECKCHGVSGSCTTKTCWTTLPQFRELGYVLKDKYNEAVHVEPVR
ASRNKRPTFLKIKKPLSYRKPMDTDLVYIEKSPNYCEEDPVTGSVGTQGRACNKTAPQASGCDLMCCGRGYNT
HQYARVWQCNCKFHWCYYVKCNTCSERTEMYTCKLE

| | | |
|---|---|---|
| NOV5g, 228753465 | SEQ ID NO: 45 | 966 bp |
| DNA Sequence | ORF Start: at 1 | ORF Stop: end of sequence |

AGATCTCTGGGCGCAACGGTCATCTGTAACAAGATCCCAGGCCTGGCTCCCAGACAGCGGGCGATCTGCCAGA
GCCGGCCCGACGCCATCATCGTCATAGGAGAAGGCTCACAAATGGGCCTGGACGAGTGTCAGTTTCAGTTCCG
CAATGGCCGCTGGAACTGCTCTGCACTGGGAGAGCGCACCGTCTTCGGGAAGGAGCTCAAAGTGGGGAGCCGG
GAGGCTGCGTTCACCTACGCCATCATTGCCGCCGGCGTGGCCCACGCCATCACAGCTGCCTGTACCCAGGGCA
ACCTGAGCGACTGTGACTGCGACAAAGAGAAGCAAGGCCAGTACCACCGGGACGAGGGCTGGAAGTGGGGTGG
CTGCTCTGCCGACATCCGCTACGGCATCGGCTTCGCCAAGGTCTTTGTGGATGCCCGGGAGATCAAGCAGAAT
GCCCGGACTCTCATGAACTTGCACAACAACGAGGCAGGCCGAAAGATCCTGGAGGAGAACATGAAGCTGGAAT
GTAAGTGCCACGGCGTGTCAGGCTCGTGCACCACCAAGACGTGCTGGACCACACTGCCACAGTTTCGGGAGCT
GGGCTACGTGCTCAAGGACAAGTACAACGAGGCCGTTCACGTGGAGCCTGTGCGTGCCAGCCGCAACAAGCGG
CCCACCTTCCTGAAGATCAAGAACCCACTGTCGTACCGCAAGCCCATGGACACGGACCTGGTGTACATCGAGA
AGTCGCCCAACTACTGCGAGGAGGACCCGGTGACCGGCAGTGTGGGCACCCAGGGCCGCGCCTGCAACAAGAC
GGCTCCCCAGGCCAGCGGCTGTGACCTCATGTGCTGTGGGCGTGGCTACAACACCCACCAGTACGCCCGCGTG
TGGCAGTACAACTGTAAGTTCCACTGGTGCTGCTATGTCAAGTGCAACACGTGCAGCGAGCGCACGGAGATGT
ACACGTGCAAGCTCGAG

| | | | |
|---|---|---|---|
| NOV5g, 228753465 | | | |
| Protein Sequence | SEQ ID NO: 46 | 322 aa | MW at 36173.0kD |

RSLGATVICNKIPGLAPRQRAICQSRPDAIIVIGEGSQMGLDECQFQFRNGRWNCSALGERTVFGKELKVGSR
EAAFTYAIIAAGVAHAITAACTQGNLSDCDCDKEKQGQYHRDEGWKWGGCSADIRYGIGFAKVFVDAREIKQN
ARTLMNLHNNEAGRKILEENMKLECKCHGVSGSCTTKTCWTTLPQFRELGYVLKDKYNEAVHVEPVRASRNKR
PTFLKIKKPLSYRKPMDTDLVYIEKSPNYCEEDPVTGSVGTQGRACNKTAPQASGCDLMCCGRGYNTHQYARV
WQYNCKFHWCCYVKCNTCSERTEMYTCKLE

| | | |
|---|---|---|
| NOV5h, 228753438 | SEQ ID NO: 47 | 966 bp |
| DNA Sequence | ORF Start: at 1 | ORF Stop: end of sequence |

AGATCTCTGGGCGCAACGGTCATCTGTAACAAGATCCCAGGCCTGGCTCCCAGACAGCGGGCGATCTGCCAGA
GCCGGCCCGACGCCATCATCGTCATAGGAGAAGGCTCACAAATGGGCCTGGACGAGTGTCAGTTTCAGTTCCG
CAATGGCCGCTGGAACTGCTCTGCACTGGGAGAGCGCACCGTCTTCGGGAAGGAGCTCAAAGTGGGGAGCCGG
GAGGCTGCGTTCACCTACGCCATCATTGCCGCCGGCGTGGCCCACGCCATCACAGCTGCCTGTACCCAGGGCA
ACCTGAGCGACTGTGGCTGCGACAAAGAGAAGCAAGGCCAGTACCACCGGGACGAGGGCTGGAAGTGGGGTGG
CTGCTCTGCCGACATCCGCTACGGCATCGGCTTCGCCAAGGTCTTTGTGGATGCCCGGGAGATCAAGCAGAAT
GCCCGGACTCTCATGAACTTGCACAACAACGAGGCAGGCCGAAAGATCCTGGAGGAGAACATGAAGCTGGAAT
GTAAGTGCCACGGCGTGTCAGGCTCGTGCACCACCAAGACGTGCTGGACCACACTGCCACAGTTTCGGGAGCT
GGGCTACGTGCTCAAGGACAAGTACAACGAGGCCGTTCACGTGGAGCCTGTGCGTGCCAGCCGCAACAAGCGG
CCCACCTTCCTGAAGATCAAGAAGCCACTGTCGTACCGCAAGCCCATGGACACGGACCTGGTGTACATCGAGA
AGTCGACCAACTGCTGCGAGGAGGACCCGGTGACCGGCAGTGTGGGCACCCAGGGCCGCGCCTGCAACAAGAC
GGCTCCCCAGGCCAGCGGCTGTGACCTCATGTGCTGTGGGCGTGGCTACAACACCCACCAGTACGCCCGCGTG
TGGCAGTGCAACTGTAAGTTCCACTGGTGCTGCTATGTCAAGTGCAACACGTGCAGCGAGCGCACGGAGATGT
ACACGTGCAAGCTCGAG

| | | | |
|---|---|---|---|
| NOV5h, 228753438 | | | |
| Protein Sequence | SEQ ID NO: 48 | 322 aa | MW at 35998.9kD |

RSLGATVICNKIPGLAPRQRAICQSRPDAIIVIGEGSQMGLDECQFQFRNGRWNCSALGERTVFGKELKVGSR
EAAFTYAIIAAGVAHAITAACTQGNLSDCGCDKEKQGQYHRDEGWKWGGCSADIRYGIGFAKVFVDAREIKQN
ARTLMNLHNNEAGRKILEENMKLECKCHGVSGSCTTKTCWTTLPQFRELGYVLKDKYNEAVHVEPVRASRNKR
PTFLKIKKPLSYRKPMDTDLVYIEKSTNCCEEDPVTGSVGTQGRACNKTAPQASGCDLMCCGRGYNTHQYARV
WQCNCKFHWCCYVKCNTCSERTEMYTCKLE

| | | |
|---|---|---|
| NOV5i, 228753449 | SEQ ID NO: 49 | 966 bp |
| DNA Sequence | ORF Start: at 1 | ORF Stop: end of sequence |

AGATCTCTGGGCGCAACGGTCATCTGTAACAAGATCCCAGGCCTGGCTCCCAGACAGCGGGCGATCTGCCAGA
GCCGGCCCGACGCCATCATCGTCATAGGAGAAGGCTCACAAATGGGCCTGGACGAGTGTCAGTTTCAGTTCCG
CAATGGCCGCTGGAACTGCTCTGCACTGGGAGAGCGCACCGTCTTCGGGAAGGAGCTCAAAGTGGGGAGCCGG
GAGGCTGCGTTCACCTACGCCATCATTGCCGCCGGCGTGGCCCACGCCATCACAGCTGCCTGTACCCAGGGCA
ACCTGAGCGACTGTGGCTGCGACAAAGAGAAGCAAGGCCAGTACCACCGGGACGAGGGCTGGAAGTGGGGTGG
CTGCTCTGCCGACATCCGCTACGGCATCGGCTTCGCCAAGGTCTTTGTGGATGCCCGGGAGATCAAGCAGAAT
GCCCGGACTCTCATGAACTTGCACAACAACGAGGCAGGCCGAAAGATCCTGGAGGAGAACATGAAGCTGGGAT
GTAAGTGCCACGGCGTGTCAGGCTCGTGCACCACCAAGACGTGCTGGACCACACTGCCACAGTTTCGGGAGCT
GGGCTACGTGCTCAAGGACAAGTACAACGAGGCCGTTCACGTGGAGCCTGTGCGTGCCAGCCGCAACAAGCGG
CCCACCTTCCTGAAGATCAAGAAGCCACTGTCGTACCGCAAGCCCATGGACACGGACCTGGTGTACATCGAGA
AGTCGACCAACTGCTGCGAGGAGGACCCGGTGACCGGCAGTCTGGGCACCCAGGGCCGCGCCTGCAACAAGAC
GGCTCCCCAGGCCAGCGGCTGTGACCTCATGTGCTGTGGGCGTGGCTACAACACCCACCAGTACGCCCGCGTG
TGGCAGTGCAACTGTAAGTTCCACTGGTGCTGCTATGTCAAGTGCAACACGTGCAGCGAGCGCACGGAGATGT
ACACGTGCAAGCTCGAG

| | | | |
|---|---|---|---|
| NOV5i, 228753449 | | | |
| Protein Sequence | SEQ ID NO: 50 | 322 aa | MW at 35926.8kD |

RSLGATVICNKIPGLAPRQRAICQSRPDAIIVIGEGSQMGLDECQFQFRNGRWNCSALGERTVFGKELKVGSR
EAAFTYAIIAAGVAHAITAACTQGNLSDCGCDKEKQGQYHRDEGWKWGGCSADIRYGIGFAKVFVDAREIKQN
ARTLMNLNNNEAGRKILEENMKLGCKCHGVSGSCTTKTCWTTLPQFRELGYVLKDKYNEAVHVEPVRASRNKR
PTFLKIKKPLSYRKPMDTDLVYIEKSTNCCEEDPVTCSVGTQGRACNKTAPQASGCDLMCCGRGYNTHQYARV
WQCNCKFHWCCYVKCNTCSERTEMYTCKLE

| | | |
|---|---|---|
| NOV5j, CG50353-02 | SEQ ID NO: 51 | 966 bp |
| DNA Sequence | ORF Start: at 7 | ORF Stop: at 961 |

AGATCTCTGGGCGCAACGGTCATCTGTAACAAGATCCCAGGCCTGGCTCCCAGACAGCGGGCGATCTGCCAGA
GCCGGCCCGACGCCATCATCGTCATAGGAGAAGGCTCACAAATGGGCCTGGACGAGTGTCAGTTTCAGTTCCG
CAATGGCCGCTGGAACTGCTCTGCACTGGGAGAGCGCACCGTCTTCGGGAAGGAGCTCAAAGTGGGGAGCCGG
GAGGCTGCGTTCACCTACGCCATCATTGCCGCCGGCGTGGCCCACGCCATCACAGCTGCCTGTACCCAGGGCA
ACCTGAGCGACTGTGGCTGCGACAAAGAGAAGCAAGGCCAGTACCACCGGGACGAGGGCTGGAAGTGGGGTGG
CTGCTCTGCCGACATCCGCTACGGCATCGGCTTCGCCAAGGTCTTTGTGGATGCCCGGGAGATCAAGCAGAAT
GCCCGGACTCTCATGAACTTGCACAACAACGAGGCAGGCCGAAAGATCCTGGAGGAGAACATGAAGCTGGAAT
GTAAGTGCCACGGCGTGTCAGGCTCGTGCACCACCAAGACGTGCTGGACCACACTGCCACAGTTTCGGGAGCT
GGGCTACGTGCTCAAGGACAAGTACAACGAGGCCGTTCACGTGGAGCCTGTGCGTGCCAGCCGCAACAAGCGG
CCCACCTTCCTGAAGATCAAGAAGCCACTGTCGTACCGCAAGCCCATGGACACGGACCTGGTGTACATCGAGA
AGTCGCCCAACTACTGCGAGGAGGACCCGGTGACCGGCAGTGTGGGCACCCAGGGCCGCGCCTGCAACAAGAC
GGCTCCCCAGGCCAGCGGCTGTGACCTCATGTGCTGTGGGCGTGGCTACAACACCCACCAGTACGCCCGCGTG
TGGCAGTGCAACTGTAAGTTCCACTGGTGCTGCTATGTCAAGTGCAACACGTGCAGCGAGCGCACGGAGATGT
ACACGTGCAAGCTCGAG

| | | | |
|---|---|---|---|
| NOV5j, CG50353-02 | | | |
| Protein Sequence | SEQ ID NO: 52 | 318 aa | MW at 35569.4kD |

LGATVICNKIPGLAPRQRAICQSRPDAIIVIGEGSQMGLDECQFQFRNGRWNCSALGERTVFGKELKVGSREA
AFTYAIIAAGVAHAITAACTQGNLSDCGCDKEKQGQYHRDEGWKWGGCSADIRYGIGFAKVFVDAREIKQNAR
TLMNLHNNEAGRKILEENMKLECKCHGVSGSCTTKTCWTTLPQFRELGYVLKDKYNEAVHVEPVRASRNKRPT
FLKIKKPLSYRKPMDTDLVYIEKSPNYCEEDPVTGSVGTQGRACNKTAPQASGCDLMCCGRGYNTHQYARVWQ
CNCKFHWCCYVKCNTCSERTEMYTCK

| | | |
|---|---|---|
| NOV5k, CG50353-03 | SEQ ID NO: 53 | 1057 bp |
| DNA Sequence | ORF Start: ATG at 1 | ORF Stop: TGA at 1048 |

ATGAACCGGAAAGCGCGGCGCTGCCTGGGCCACCTCTTTCTCAGCCTGGGCATGGTCTGTCTCCTAGCATGTG
GCTTCTCCTCAGTGGTAGCTCTGGGCGCAACGGTCATCTGTAACAAGATCCCAGGCCTGGCTCCCAGACAGCG
GGCGATCTGCCAGAGCCGGCCCGACGCCATCATCGTCATAGGAGAAGGCTCACAAATGGGCCTGGACGAGTGT
CAGTTTCAGTTCCGCAATGGCCGCTGGAACTGCTCTGCACTGGGAGAGCGCACCGTCTTCGGGAAGGAGCTCA
AAGTGGGGAGCCGGGACGGTGCGTTCACCTACGCCATCATTGCCGCCGGCGTGGCCCACGCCATCACAGCTGC
CTGTACCCATGGCAACCTGAGCGACTGTGGCTGCGACAAAGAGAAGCAAGGCCAGTACCACCGGGACGAGGGC
TGGAAGTGGGGTGGCTGCTCTGCCGACATCCGCTACGGCATCGGCTTCGCCAAGGTCTTCGTGGACGCTCGGG
AGATCATGAACAACGCGCGGCGCCTCATGAACCTGCATAACAATGAGGCCGGCAGGAAGGTTCTAGAGGACCG
GATGCAGCTGGAGTGCAAGTGCCACGGCGTGTCTGGCTCCTGCACCACCAAAACCTGCTGGACCACGCTGCCC
AAGTTCCGAGAGGTGGGCCACCTGCTGAAGGAGAAGTACAACGCGGCCGTGCAGGTGGAGGTGGTGCGGGCCA
GCCGTCTGCGGCAGCCCACCTTCCTGCGCATCAAACAGCTGCGCAGCTATCGCAAGCCCATGAAGACGGACCT
GGTGTACATCGAGAAGTCGCCCAACTACTGCGAGCAGGACCCGGTGACCGGCAGTGTGGGCACGCAGGGCCGC
GCCTGCAACAAGACGGCTCCCCAGGCCAGCGGCTGTGACCTCATGTGCTGTGGGCGTGGCTACAACACCCACC
AGTACGCCCGCGTGTGGCAGTGCAACTGTAAGTTCCACTGGTGCTGCTATGTCAAGTGCAACACGTGCAGCGA
GCGCACGGAGATGTACACGTGCAAGTGAGCCCCGT

| | | | |
|---|---|---|---|
| NOV5k, CG50353-03 | | | |
| Protein Sequence | SEQ ID NO: 54 | 349 aa | MW at 38980.7kD |

MNRKARRCLGHLFLSLGMVCLLACGFSSVVALGATVICNKIPGLAPRQRAICQSRPDAIIVIGEGSQMGLDEC
QFQFRNGRWNCSALGERTVFGKELKVGSRDGAFTYAIIAAGVAHAITAACTHGNLSDCGCDKEKQGQYHRDEG
WKWGGCSADIRYGIGFAKVFVDAREIMKNARRLMNLHNNEAGRKVLEDRMQLECKCHGVSGSCTTKTCWTTLP
KFREVGHLLKEKYNAAVQVEVVRASRLRQPTFLRIKQLRSYRKPMKTDLVYIEKSPNYCEEDPVTGSVGTQGR
ACNKTAPQASGCDLMCCGRGYNTHQYARVWQCNCKFHWCCYVKCNTCSERTEMYTCK

| | | |
|---|---|---|
| | SEQ ID NO: 55 | 1628 bp |
| NOV5l, SNP13382474 of | ORF Start: ATG at 1 | ORF Stop: TGA at 1048 |
| CG50353-01, DNA Sequence | SNP Pos: 951 | SNP Change: G to T |

ATGAACCGGAAAGCGCGGCGCTGCCTGGGCCACCTCTTTCTCAGCCTGGGCATGGTCTGTCTCCTAGCATGTG
GCTTCTCCTCAGTGGTAGCTCTGGGCGCAACGGTCATCTGTAACAAGATCCCAGGCCTGGCTCCCAGACAGCG
GGCGATCTGCCAGAGCCGGCCCGACGCCATCATCGTCATAGGAGAAGGCTCACAAATGGGCCTGGACGAGTGT
CAGTTTCAGTTCCGCAATGGCCGCTGGAACTGCTCTGCACTGGGAGAGCGCACCGTCTTCGGGAAGGAGCTCA
AAGTGGGGAGCCGGGACGGTGCGTTCACCTACGCCATCATTGCCGCCGGCGTGGCCCACGCCATCACAGCTGC
CTGTACCCATGGCAACCTGAGCGACTGTGGCTGCGACAAAGAGAAGCAAGGCCAGTACCACCGGGACGAGGGC
TGGAAGTGGGGTGGCTGCTCTGCCGACATCCGCTACGGCATCGGCTTCGCCAAGGTCTTCGTGGACGCTCGGG
AGATCATGAAGAACGCGCGGCGCCTCATGAACCTGCATAACAATGAGGCCGGCAGGAAGGTTCTAGAGGACCG
GATGCAGCTGGAGTGCAAGTGCCACGGCGTGTCTGGCTCCTGCACCACCAAAACCTGCTGGACCACGCTGCCC
AAGTTCCGAGAGGTGGGCCACCTGCTGAAGGAGAAGTACAACGCGGCCGTGCAGGTGGAGGTGGTGCGGGCCA
GCCGTCTGCGGCAGCCCACCTTCCTGCGCATCAAACAGCTGCGCAGCTATCGCAAGCCCATGAAGACGGACCT
GGTGTACATCGAGAAGTCGCCCAACTACTGCGAGGAGGACCCGGTGACCGGCAGTGTGGGCACGCAGGGCCGC
GCCTGCAACAAGACGGCTCCCCAGGCCAGCGGCTGTGACCTCATGTGCTGTGGGCGTGGCTACAACACCCACC
ATTACGCCCGCGTGTGGCAGTGCAACTGTAAGTTCCACTGGTGCTGCTATGTCAAGTGCAACACGTGCAGCGA
GCGCACGGAGATGTACACGTGCAAGTGAGCCCCGTGTGCACACCACCCTCCCGCTGCAAGTCAGATTGCTGGG
AGGACTGGACCGTTTCCAAGCTGCGGGCTCCCTGGCAGGATGCTGAGCTTGTCTTTTCTGCTGACGAGGGTAC
TTTTCCTGGGTTTCCTGCAGGCATCCGTGGGGGAAAAAAAATCTCTCAGAGCCCTCAACTATTCTGTTCCACA
CCCAATGCTGCTCCACCCTCCCCCAGACACAGCCCAGGTCCCTCCGCGGCTGGAGCGAAGCCTTCTGCAGCAG
GAACTCTGGACCCCTGGGCCTCATCACAGCAATATTTAACAATTTATTCTGATAAAAATAATATTAATTTATT
TAATTAAAAAGAATTCTTCCACCTCGTCGGGATCCGTTTTCTGCAATCAAAGTGGACTGCTTGCTTTCCTAGC
AGGATGATTTTGTTGCTAGGACAAGGAGCCGTGTAGAAGTGTACATAACTATTCTTTATGCAGATATTTCTAC
TAGCTGATTTTGCAGGTACCCACCTTGCAGCACTAGATGTTTAAGTACAAGAGGAGACATCTTTTATGCATAT
ATAGATATACACACACGAAAAA

| | | | |
|---|---|---|---|
| NOV5l, SNP13382474 of | SEQ ID NO: 56 | | MW at 38989.7kD |
| CG50353-01, Protein Sequence | SNP Pos: 317 | 349 aa | SNP Change: Gln to His |

MNRKARRCLGHLFLSLGMVCLLACGFSSVVALGATVICNKIPGLAPRQRAICQSRPDAIIVIGEGSQMGLDEC
QFQFRNGRWNCSALGERTVFGKELKVGSRDGAFTYAIIAAGVAHAITAACTHGNLSDCGCDKEKQGQYHRDEG
WKWGGCSADIRYGIGFAKVFVDAREIMKNARRLMNLHNNEAGRKVLEDRMQLECKCHGVSGSCTTKTCWTTLP
KFREVGHLLKEKYNAAVQVEVVRASRLRQPTFLRIKQLRSYRKPMKTDLVYIEKSPNYCEEDPVTGSVGTQGR
ACNKTAPQASGCDLMCCGRGYNTHHYARVWQCNCKFHWCCYVKCNTCSERTEMYTCK

[0381] A ClustalW comparison of the above protein sequences yields the following sequence alignment shown in Table 5B.

TABLE 5B
Comparison of the NOV5 protein sequences.

| | |
|---|---|
| NOV5a | MNRKARRCLGHLFLSLGMVCLLACGFSSVVALGATVICNKIPGLAPRQRAICQSRPDAII |
| NOV5b | -----------------------------RSLGATVICNKIPGLAPRQRAICQSRPDAII |
| NOV5c | -----------------------------RSLGATVICNKIPGLAPRQRAICQSRPDAII |
| NOV5d | -----------------------------RSLGATVICNKIPGLAPRQRAICQSRPDAII |
| NOV5e | -----------------------------RSLGATVICNKIPGLAPRQRAICQSRPDAII |
| NOV5f | -----------------------SAEFALRSLGATVICNKIPGLAPRQRAICQSRPDAII |
| NOV5g | -----------------------------RSLGATVICNKIPGLAPRQRAICQSRPDAII |
| NOV5h | -----------------------------RSLGATVICNKIPGLAPRQRAICQSRPDAII |
| NOV5i | -----------------------------RSLGATVICNKIPGLAPRQRAICQSRPDAII |
| NOV5j | -------------------------------LGATVICNKIPGLAPRQRAICQSRPDAII |
| NOV5k | MNRKARRCLGHLFLSLGMVCLLACGFSSVVALGATVICNKIPGLAPRQRAICQSRPDAII |
| NOV5a | VIGEGSQMGLDECQFQFRNGRWNCSALGERTVFGKELKVGSRDGAFTYAIIAAGVAHAIT |
| NOV5b | VIGEGSQMGLDECQFQFRNGRWNCSALGERTVFGKELKVGSREAAFTYAIIAAGVAHAIT |
| NOV5c | VIGEGSQMGLDECQFQFRNGRWNCSALGERTVFGKELKVGSREAAFTYAIIAAGVAHAIT |
| NOV5d | VIGEGSQMGLDECQFQFRNGRWNCSALGERTVFGKELKVGSREAAFTYAIIAAGVAHAIT |
| NOV5e | VIGEGSQMGLDECQFQFRNGRWNCSALGERTVFGKELKVGSREAAFTYAIIAAGVVHAIT |
| NOV5f | VIGEGSQMGLDECQFQFRNGRWNCSALGERTVFGKELKVGSREAAFTYAIIAAGVAHAIT |
| NOV5g | VIGEGSQMGLDECQFQFRNGRWNCSALGERTVFGKELKVGSREAAFTYAIIAAGVAHAIT |
| NOV5h | VIGEGSQMGLDECQFQFRNGRWNCSALGERTVFGKELKVGSREAAFTYAIIAAGVAHAIT |
| NOV5i | VIGEGSQMGLDECQFQFRNGRWNCSALGERTVFGKELKVGSREAAFTYAIIAAGVAHAIT |
| NOV5j | VIGEGSQMGLDECQFQFRNGRWNCSALGERTVFGKELKVGSREAAFTYAIIAAGVAHAIT |
| NOV5k | VIGEGSQMGLDECQFQFRNGRWNCSALGERTVFGKELKVGSRDGAFTYAIIAAGVAHAIT |
| NOV5a | AACTHGNLSDCGCDKEKQGQYHRDEGWKWGGCSADIRYGIGFAKVFVDAREIMKNARRLM |
| NOV5b | AACTQGNLSDCGCDKEKQGQYHRDEGWKWGGCSADIRYGIGFAKVFVDAREIKQNARTLM |
| NOV5c | AACTQGNLSDCGCDKEKQGQYHRDEGWKWGGCSADIRYGIGFAKVFVDAREIKQNARTLM |
| NOV5d | AACTQGNLSDCGCDKEKQGQYHRDEGWKWGGCSADIRYGIGFAKVFVDAREIKQNARTLM |
| NOV5e | AACTQGNLSDCGCDKEKQGQYHRDEGWKWGGCSADIRYGIGFAKVFVDAREIKQNARTLM |
| NOV5f | AACTQGNLSDCGCDKEKQGQYHRDEGWKWGGCSADIRYGIGFAKVFVDAREIKQNARTLM |
| NOV5g | AACTQGNLSDCDCDKEKQGQYHRDEGWKWGGCSADIRYGIGFAKVFVDAREIKQNARTLM |
| NOV5h | AACTQGNLSDCGCDKEKQGQYHRDEGWKWGGCSADIRYGIGFAKVFVDAREIKQNARTLM |
| NOV5i | AACTQGNLSDCGCDKEKQGQYHRDEGWKWGGCSADIRYGIGFAKVFVDAREIKQNARTLM |
| NOV5j | AACTQGNLSDCGCDKEKQGQYHRDEGWKWGGCSADIRYGIGFAKVFVDAREIKQNARTLM |
| NOV5k | AACTHGNLSDCGCDKEKQGQYHRDEGWKWGGCSADIRYGIGFAKVFVDAREIMKNARRLM |
| NOV5a | NLHNNEAGRKVLEDRMQLECKCHGVSGSCTTKTCWTTLPKFREVGHLLKEKYNAAVQVEV |
| NOV5b | NLHNNEAGRKILEENMKLECKCHGVSGSCTTKTCWTTLPQFRELGYVLKDKYNEAVHVEP |
| NOV5c | NLHNNEAGRKILEENMKLECKCHGVSGSCTTKTCWTTLPQFRELGYVLKDKYNEAVHVEP |
| NOV5d | NLHNNEAGRKILEENMKLECKCHGVSGSCTTKTCWTTLPQFRELGYVLKDKYNEAVHVEP |
| NOV5e | NLHNNEAGRKILEENMKLECKCHGVSGSCTTKTCWTTLPQFRELGYVLKDKYNEAVHVEP |
| NOV5f | NLHNNEAGRKILEENMKLECKCHGVSGSCTTKTCWTTLPQFRELGYVLKDKYNEAVHVEP |
| NOV5g | NLHNNEAGRKILEENMKLECKCHGVSCSCTTKTCWTTLPQFRELGYVLKDKYNEAVHVEP |
| NOV5h | NLHNNEAGRKILEENMKLECKCHGVSGSCTTKTCWTTLPQFRELGYVLKDKYNEAVHVEP |
| NOV5i | NLHNNEAGRKILEENMKLGCKCHGVSGSCTTKTCWTTLPQFRELGYVLKDKYNEAVHVEP |
| NOV5j | NLHNNEAGRKILEENMKLECKCHGVSGSCTTKTCWTTLPQFRELGYVLKDKYNEAVHVEP |
| NOV5k | NLHNNEAGRKVLEDRMQLECKCHGVSGSCTTKTCWTTLPKFREVGHLLKEKYNAAVQVEV |
| NOV5a | VRASRLRQPTFLRIKQLRSYRKPMKTDLVYIEKSPNYCEEDPVTGSVGTQGRACNKTAPQ |
| NOV5b | VRASRNKRPTFLKIKKPLSYRKPMDTDLVYIEKSPNYCEEDPVTGSVGTQGRACNKTAPQ |
| NOV5c | VRASRNKRPTFLKIKKPLSYRKPMDTDLVYIEKSPNYCEEDPVTGSVGTQGRACNKTAPQ |
| NOV5d | VRASRNKRPTFLKIKKPLSYRKPMDTDLVYIEKSPNYCEEDPVTGSVGTQGRACNKTAPQ |
| NOV5e | VRASRNKRPTFLKIKKPLSYRKPMDTDLVYIEKSPNYCEEDPVTGSVGTQGRACNKTAPQ |
| NOV5f | VRASRNKRPTFLKIKKPLSYRKPMDTDLVYIEKSPNYCEEDPVTGSVGTQGRACNKTAPQ |
| NOV5g | VRASRNKRPTFLKIKKPLSYRKPMDTDLVYIEKSPNYCEEDPVTGSVGTQGRACNKTAPQ |
| NOV5h | VRASRNKRPTFLKIKKPLSYRKPMDTDLVYIEKSTNCCEEDPVTGSVGTQGRACNKTAPQ |
| NOV5i | VRASRNKRPTFLKIKKPLSYRKPMDTDLVYIEKSTNCCEEDPVTGSVGTQGRACNKTAPQ |
| NOV5j | VRASRNKRPTFLKIKKPLSYRKPMDTDLVYIEKSPNYCEEDPVTGSVCTQGRACNKTAPQ |
| NOV5k | VRASRLRQPTFLRIKQLRSYRKPMKTDLVYIEKSPNYCEEDPVTGSVGTQGRACNKTAPQ |
| NOV5a | ASGCDLMCCGRGYNTHQYARVWQCNCKFHWCCYVKCNTCSERTEMYTCK-- |
| NOV5b | ASGCDLMCCGRGYNTHQYARVWQCNCKFHWCCYVKCNTCSERTEMYTCKLE |
| NOV5c | ASGCDLMCCGRGYNTHQYARVWQCNCKFHWCCYVKCNTCSERTEMYTCKLE |
| NOV5d | ASGCDLMCCGRGYNTHQYARVWQCNCKFHWCVYVKCNTCSERTEMYTCKLE |
| NOV5e | ASGCDLMCCGRGYNTHQYARVWQCNCKFHWCCYVKCNTCSERTEMYTCKLE |
| NOV5f | ASGCDLMCCGRGYNTHQYARVWQCNCKFHWCYYVKCNTCSERTEMYTCKLE |
| NOV5g | ASGCDLMCCGRGYNTHQYARVWQYNCKFHWCCYVKCNTCSERTEMYTCKLE |
| NOV5h | ASGCDLMCCGRGYNTHQYARVWQCNCKFHWCCYVKCNTCSERTEMYTCKLE |
| NOV5i | ASGCDLMCCGRGYNTHQYARVWQCNCKFHWCCYVKCNTCSERTEMYTCKLE |
| NOV5j | ASGCDLMCCGRGYNTHQYARVWQCNCKFHWCCYVKCNTCSERTEMYTCK-- |
| NOV5k | ASGCDLMCCGRGYNTHQYARVWQCNCKFHWCCYVKCNTCSERTEMYTCK-- |
| NOV5a | (SEQ ID NO: 34) |
| NOV5b | (SEQ ID NO: 36) |
| NOV5c | (SEQ ID NO: 38) |
| NOV5d | (SEQ ID NO: 40) |
| NOV5e | (SEQ ID NO: 42) |
| NOV5f | (SEQ ID NO: 44) |
| NOV5g | (SEQ ID NO: 46) |
| NOV5h | (SEQ ID NO: 48) |
| NOV5i | (SEQ ID NO: 50) |
| NOV5j | (SEQ ID NO: 52) |
| NOV5k | (SEQ ID NO: 54) |

[0382] Further analysis of the NOV5a protein yielded the following properties shown in Table 5C.

TABLE 5C
Protein Sequence Properties NOV5a

| SignalP | Cleavage site between residues 32 and 33 | | | |
|---|---|---|---|---|
| analysis: | | | | |
| PSORT II | PSG: a new signal peptide prediction method | | | |
| analysis: | N-region: length 7; pos. chg 4; neg. chg 0 | | | |
| | H-region: length 32; peak value 10.30 | | | |
| | PSG score: 5.90 | | | |
| | GvH: von Heijne's method for signal seq. recognition | | | |
| | GvH score (threshold: −2.1): −0.60 | | | |
| | possible cleavage site: between 27 and 28 | | | |
| | >>> Seems to have a cleavable signal peptide (1 to 27) | | | |
| | ALOM: Klein et al's method for TM region allocation | | | |
| | Init position for calculation: 28 | | | |
| | Tentative number of TMS(s) for the threshold 0.5: 2 | | | |
| | Number of TMS(s) for threshold 0.5: 0 | | | |
| | PERIPHERAL | Likelihood = 6.89 (at 151) | | |
| | ALOM score: 0.05 (number of TMSs: 0) | | | |
| | MTOP: Prediction of membrane topology (Hartmann et al.) | | | |
| | Center position for calculation: 13 | | | |
| | Charge difference: −2.5 C(3.0)-N(5.5) | | | |
| | N >= C: N-terminal side will be inside | | | |
| | MITDISC: discrimination of mitochondrial targeting seq | | | |
| | R content: | 6 | Hyd Moment(75): | 11.39 |
| | Hyd Moment(95): | 16.83 | G content: | 5 |
| | D/E content: | 1 | S/T content: | 5 |

```
Score: 1.59
Gavel: prediction of cleavage sites for mitochondrial preseq
R-2 motif at 65 SRP|DA
NUCDISC: discrimination of nuclear localization signals
pat4: none
pat7: none
bipartite: none
content of basic residues: 14.6%
NLS Score: −0.47
KDEL: ER retention motif in the C-terminus: none
ER Membrane Retention Signals:
XXRR-like motif in the N-terminus: NRKA
none
SKL: peroxisomal targeting signal in the C-terminus: none
PTS2: 2nd peroxisomal targeting signal: none
VAC: possible vacuolar targeting motif: found
TLPK at 217
RNA-binding motif: none
Actinin-type actin-binding motif:
type 1: none
type 2: none
NMYR: N-myristoylation pattern: none
Prenylation motif: none
memYQRL: transport motif from cell surface to Golgi: none
Tyrosines in the tail: none
Dileucine motif in the tail: none
checking 63 PROSITE DNA binding motifs: none
checking 71 PROSITE ribosomal protein motifs: none
checking 33 PROSITE prokaryotic DNA binding motifs: none
NNCN: Reinhardt's method for Cytoplasmic/Nuclear discrimination
Prediction: cytoplasmic
Reliability: 55.5
COIL: Lupas's algorithm to detect coiled-coil regions
total: 0 residues
Final Results (k = 9/23):
65.2%: mitochondrial
13.0%: Golgi
  8.7%: extracellular, including cell wall
  8.7%: endoplasmic reticulum
  4.3%: cytoplasmic
>> prediction for CG50353-01 is mit (k = 23)
```

[0383] A search of the NOV5a protein against the Geneseq database, a proprietary database that contains sequences published in patents and patent publication, yielded several homologous proteins shown in Table 5D.

TABLE 5D
Geneseq Results for NOV5a

| | | NOV5a | Identities/ | |
|---|---|---|---|---|
| | | Residues/ | Similarities for | |
| Geneseq | Protein/Organism/Length [Patent #, | Match | the Matched | Expect |
| Identifier | Date] | Residues | Region | Value |
| ABJ10594 | Human novel protein NOV5a SEQ ID | 1 . . . 349 | 349/349 (100%) | 0.0 |
| | NO: 16 - Homo sapiens, 349 aa. | 1 . . . 349 | 349/349 (100%) | |
| | [WO200259315-A2, 01 AUG. 2002] | | | |
| AAY57598 | Human Wnt-7a protein - Homo | 1 . . . 349 | 321/349 (91%) | 0.0 |
| | sapiens, 349 aa. [WO9957248-A1, | 1 . . . 349 | 335/349 (95%) | |
| | 11 NOV. 1999] | | | |
| AAY70737 | Human Wnt-7a protein - Homo | 1 . . . 349 | 321/349 (91%) | 0.0 |
| | sapiens, 349 aa. [WO200021555-A1, | 1 . . . 349 | 335/349 (95%) | |
| | 20 APR. 2000] | | | |
| AAB19789 | Human Wnt-7a protein involved in | 1 . . . 349 | 321/349 (91%) | 0.0 |
| | kidney tubulogenesis - Homo sapiens, | 1 . . . 349 | 335/349 (95%) | |
| | 349 aa. [WO200061630-A1, | | | |
| | 19 OCT. 2000] | | | |
| AAE34043 | WNT-7A protein - Unidentified, 349 | 1 . . . 349 | 317/349 (90%) | 0.0 |
| | aa. [WO200290992-A2, | 1 . . . 349 | 333/349 (94%) | |
| | 14 NOV. 2002] | | | |

[0384] In a BLAST search of public sequence databases, the NOV5a protein was found to have homology to the proteins shown in the BLASTP data in Table 5E.

TABLE 5E
Public BLASTP Results for NOV5a

| | | NOV5a | Identities/ | |
|---|---|---|---|---|
| Protein | | Residues/ | Similarities for | |
| Accession | | Match | the Matched | Expect |
| Number | Protein/Organism/Length | Residues | Portion | Value |
| O00755 | Wnt-7a protein precursor - Homo | 1 . . . 349 | 321/349 (91%) | 0.0 |
| | sapiens (Human), 349 aa. | 1 . . . 349 | 335/349 (95%) | |
| Q96H90 | Hypothetical protein - Homo sapiens | 1 . . . 349 | 317/349 (90%) | 0.0 |
| | (Human), 349 aa. | 1 . . . 349 | 333/349 (94%) | |
| AAH49093 | Hypothetical protein - Mus | 1 . . . 349 | 315/349 (90%) | 0.0 |
| | musculus (Mouse), 433 aa | 85 . . . 433 | 332/349 (94%) | |
| | (fragment). | | | |
| Q9DBY3 | Wingless-related MMTV integration | 1 . . . 349 | 315/349 (90%) | 0.0 |
| | site 7A - Mus musculus (Mouse), | 1 . . . 349 | 332/349 (94%) | |
| | 349 aa. | | | |
| P24383 | Wnt-7a protein precursor - Mus | 1 . . . 349 | 313/349 (89%) | 0.0 |
| | musculus (Mouse), 349 aa. | 1 . . . 349 | 330/349 (93%) | |

[0385] PFam analysis predicts that the NOV5a protein contains the domains shown in the Table 5F.

TABLE 5F
Domain Analysis of NOV5a

| | | Identities/ | |
|---|---|---|---|
| Pfam | | Similarities | Expect |
| Domain | NOV5a Match Region | for the Matched Region | Value |
| wnt | 37 . . . 349 | 180/352 (51%) | 3.2e−212 |
| | | 298/352 (85%) | |

### Example 6

[0386] The NOV6 clone was analyzed, and the nucleotide and encoded polypeptide sequences are shown in Table 6A.

TABLE 6A
NOV6 Sequence Analysis

| | | |
|---|---|---|
| NOV6a, CG50709-03 | SEQ ID NO: 57 | 993 bp |
| DNA Sequence | ORF Start: at 1 | ORF Stop: end of sequence |

CTGACCGGGCGGGAAGTCCTGACGCCCTTCCCAGGATTGGGCACTGCGGCAGCCCCGGCACAGGGCGGGGCCC
ACCTGAAGCAGTGTGACCTGCTGAAGCTGTCCCGGCGGCAGAAGCAGCTCTGCCGGAGGGAGCCCGGCCTGGC
TGAGACCCTGAGGGATGCTGCGCACCTCGGCCTGCTTGAGTGCCAGTTTCAGTTCCGGCATGAGCGCTGGAAC
TGTAGCCTGGAGGGCAGGACGGGCCTGCTCAAGAGAGGCTTCAAAGAGACAGCTTTCCTGTACGCGGTGTCCT
CTGCCGCCCTCACCCACACCCTGGCCCGGGCCTGCAGCGCTGGGCGCATGGAGCGCTGCACCTGTGATGACTC
TCCGGGGCTGGAGAGCCGACAGGCCTGGCAATGGGGCGTGTGCGGTGACAACCTCAAGTACAGCACCAAGTTT
CTGAGCAACTTCCTGGGGTCCAAGAGAGCAAACAAGGACCTGCGGGCACGGGCAGACGCCCACAATACCCACG
TGGGCATCAAGGCTGTGAAGAGTGGCCTCAGGACCACGTGTAAGTGCCATGGCGTATCAGGCTCCTGTGCCGT
GCGCACCTGCTGGAAGCAGCTCTCCCCGTTCCGTGAGACGGGCCAGGTGCTGAAACTGCGCTATGACTCGGCT
GTCAAGGTGTCCAGTGCCACCAATGAGGCCTTGGGCCGCCTAGAGCTGTGGGCCCCTGCCAGGCAGGGCAGCC
TCACCAAAGGCCTGGCCCCAAGGTCTGGGGACCTGGTGTACATGGAGGACTCACCCAGCTTCTGCCGGCCCAG
CAAGTACTCACCTGGCACAGCAGGTAGGGTGTGCTCCCGGGAGGCCAGCTGCAGCAGCCTGTGCTGCGGGCGG
GGCTATGACACCCAGAGCCGCCTGGTGGCCTTCTCCTGCCACTGCCAGGTGCAGTGGTGCTGCTACGTGGAGT
GCCAGCAATGTGTGCAGGAGGAGCTTGTGTACACCTGCAAGCAC

| | | | |
|---|---|---|---|
| NOV6a, CG50709-03 | | | |
| Protein Sequence | SEQ ID NO: 58 | 331 aa | MW at 36432.2kD |

LTGREVLTPFPGLGTAAPAQGGAHLKQCDLLKLSRRQKQLCRREPGLAETLRDAAHLGLLECQFQFRHERWN
CSLEGRTGLLKRGFKETAFLYAVSSAALTHTLARACSAGRMERCTCDDSPGLESRQAWQWGVCGDNLKYSTKF
LSNFLGSKRGNKDLRARADAHNTHVGIKAVKSGLRTTCKCHGVSGSCAVRTCWKQLSPFRETGQVLKLRYDSA
VKVSSATNEALGRLELWAPARQGSLTKGLAPRSGDLVYMEDSPSFCRPSKYSPGTAGRVCSREASCSSLCCGR
GYDTQSRLVAFSCHCQVQWCCYVECQQCVQEELVYTCKH

| | | |
|---|---|---|
| NOV6b, 282997951 | SEQ ID NO: 59 | 928 bp |
| DNA Sequence | ORF Start: at 2 | ORF Stop: end of sequence |

CACCGGATCCCAGTGTGACCTGCTGAAGCTGTCCCGGCGGCAGAAGCAGCTCTGCCGGAGGGAGCCCGGCCTG
GCTGAGACCCTGAGGGATGCTGCGCACCTCGGCCTGCTTGAGTGCCAGTTTCAGTTCCGGCATGAGCGCTGGA
ACTGTAGCCTGGAGGGCAGGACGGGCCTGCTCAAGAGAGGCTTCAAAGAGACAGCTTTCCTGTACGCGGTGTC
CTCTGCCGCCCTCACCCACACCCTGGCCCGGGCCTGCAGCGCTGGGCGCATGGAGCGCTGCACCTGTGATGAC
TCTCCGGGGCTGGAGAGCCGGCAGGCCTGGCAGTGGGGCGTGTGCGGTGACAACCTCAAGTACAGCACCAAGT
TTCTGAGCAACTTCCTGGGGTCCAAGAGAGCAAACAAGGACCTGCGGGCACGGGCAGACGCCCACAATACCCA
CGTGGGCATCAAGGCTGTGAAGAGTGGCCTCAGGACCACGTGTAAGTGCCATGGCGTATCAGGCTCCTGTGCC
GTGCGCACCTGCTGGAAGCAGCTCTCCCCGTTCCGTGAGACGGGCCAGGTGCTGAAACTGCGCTATGACTCGG
CTGTCAAGGTGTCCAGTGCCACCAATGAGGCCTTGGGCCGCCTAGAGCTGTGGGCCCCTGCCAGGCAGGGCAG
CCTCACCAAAGGCCTGGCCCCAAGGTCTGGGGACCTGGTGTACATGGAGGACTCACCCAGCTTCTGCCGGCCC
AGCAAGTACTCACCTGGCACAGCAGGTAGGGTGTGCTCCCGGGAGGCCAGCTGCAGCAGCCTGTGCTGCGGGC
GGGGCTATGACACCCAGAGCCGCCTGGTGGCCTTCTCCTGCCACTGCCAGGTGCAGTGGTGCTGCTACGTGGA
GTGCCAGCAATGTGTGCAGGAGGAGCTTGTGTACACCTGCAAGCTCGAGGGC

| | | | |
|---|---|---|---|
| NOV6b, 282997951 | | | |
| Protein Sequence | SEQ ID NO: 60 | 309 aa | MW at 34226.6kD |

TGSQCDLLKLSRRQKQLCRREPGLAETLRDAAHLGLLECQFQFRHERWNCSLEGRTGLLKRGFKETAFLYAVS
SAALTHTLARACSAGRMERCTCDDSPGLESRQAWQWGVCGDNLKYSTKFLSNFLGSKRGNKDLRARADAHNTH
VGIKAVKSGLRTTCKCHGVSGSCAVRTCWKQLSPFRETGQVLKLRYDSAVKVSSATNEALGRLELWAPARQGS
LTKGLAPRSGDLVYMEDSPSFCRPSKYSPGTAGRVCSREASCSSLCCGRGYDTQSRLVAFSCHCQVQWCCYVE
CQQCVQEELVYTCKLEG

| | | |
|---|---|---|
| NOV6c, CG50709-05 | SEQ ID NO: 61 | 1464 bp |
| DNA Sequence | ORF Start: ATG at 38 | ORF Stop: TAG at 1109 |

GCGAGGAGATGCTAGAGGGCGCAGCGCCGCCAGCACCATGCGCCCCCCGCCCGCGCTGGCCCTGGCCGGGCTC
TGCCTGCTGGCGCTGCCCGCCGCCGCCGCCTCCTACTTCGGCCTGACCGGGCGGGAAGTCCTGACGCCCTTCC
CAGGATTGGGCACTGCGGCAGCCCCGGCACAGGGCGGGGCCCACCTGAAGCAGTGTGACCTGCTGAAGCTGTC
CCGGCGGCAGAAGCAGCTCTGCCGGAGGGAGCCCGGCCTGGCTGAGACCCTGAGGGATGCTGCGCACCTCGGC
CTGCTTGAGTGCCAGTTTCAGTTCCGGCATGAGCGCTGGAACTGTAGCCTGGAGGGCAGGACGGGCCTGCTCA
AGAGAGGCTTCAAAGAGACAGCTTTCCTGTACGCGGTGTCCTCTGCCGCCCTCACCCACACCCTGGCCCGGGC
CTGCAGCGCTGGGCGCATGGAGCGCTGCACCTGTGATGACTCTCCGGGGCTGGAGAGCCGGCAGGCCTGGCAG
TGGGGCGTGTGCGGTGACAACCTCAAGTACAGCACCAAGTTTCTGAGCAACTTCCTGGGGTCCAAGAGAGGAA
ACAAGGACCTGCGGGCACGGGCAGACGCCCACAATACCCACGTGGGCATCAAGGCTGTGAAGAGTGGCCTCAG
GACCACGTGTAAGTGCCATGGCGTATCAGGCTCCTGTGCCGTGCGCACCTGCTGGAAGCAGCTCTCCCCGTTC
CGTGAGACGGGCCAGGTGCTGAAACTGCGCTATGACTCGGCTGTCAAGGTGTCCAGTGCCACCAATGAGGCCT
TGGGCCGCCTAGAGCTGTGGGCCCCTGCCAGGCAGGGCAGCCTCACCAAAGGCCTGGCCCCAAGGTCTGGGGA
CCTGGTGTACATGGAGGACTCACCCAGCTTCTGCCGGCCCAGCAAGTACTCACCTGGCACAGCAGGTAGGGTG
TGCTCCCGGGAGGCCAGCTGCAGCAGCCTGTGCTGCGGGCGGGGCTATGACACCCAGAGCCGCCTGGTGGCCT
TCTCCTGCCACTGCCAGGTGCAGTGGTGCTGCTACGTGGAGTGCCAGCAATGTGTGCAGGAGGAGCTTGTGTA
CACCTGCAAGCACTAGGCCTACTGCCCAGCAAGCCAGTCTGGCACTGCCAGGACCTCCTGTGGCACCCTTCAA
GCTGCCCAGCCGGCCCTCTGGGCAGACTGTCATCACATGCATGCATAAACCGGCATGTGTGCCAATGCACACG
AGTGTGCCACTCACCACCATTCCTTGGCCAGCCTTTTGCCTCCCTCGATACTCAACAAAGAGAAGCAAAGCCT
CCTCCCTTAACCCAAGCATCCCCAACCTTGTTGAGGACTTGGAGAGGAGGGCAGAGTGAGAAAGACATGGAGG
GAAATAAGGGAGACCAAGAGCACAGCAGGACTGAAATTTTGGACGGGAGAGAGGGGCTATTCCATCTTGCTTC
CTGG

| | | | |
|---|---|---|---|
| NOV6c, CG50709-05 | | | |
| Protein Sequence | SEQ ID NO: 62 | 357 aa | MW at 38970.2kD |

65MRPPPALALAGLCLLALPAAAASYFGLTGREVLTPFPGLGTAAAPAQGGAHLKQCDLLKLSRRQKQLCRREPG
LAETLRDAAHLGLLECQFQFRHERWNCSLEGRTGLLKRGFKETAFLYAVSSAALTHTLARACSAGRMERCTCD
DSPGLESRQAWQWGVCGDNLKYSTKFLSNFLGSKRGNKDLRARADAHNTHVGIKAVKSGLRTTCKCHGVSGSC
AVRTCWKQLSPFRETGQVLKLRYDSAVKVSSATNEALGRLELWAPARQGSLTKGLAPRSGDLVYMEDSPSFCR
PSKYSPGTAGRVCSREASCSSLCCGRGYDTQSRLVAFSCHCQVQWCCYVECQQCVQEELVYTCKH

| | | |
|---|---|---|
| NOV6d, 277582109 | SEQ ID NO: 63 | 1093 bp |
| DNA Sequence | ORF Start: at 2 | ORF Stop: end of sequence |

CACCGGATCCACCATGCGCCCCCCGCCCGCGCTGGCCCTGGCCGGGCTCTGCCTGCTGGCGCTGCCCGCCGCC
GCCGCCTCCTACTTCGGCCTGACCGGGCGGGAAGTCCTGACGCCCTTCCCAGGATTGGGCACTGCGGCAGCCC
CGGCACAGGGCGGGGCCCACCTGAAGCAGTGTGACCTGCTGAAGCTGTCCCGGCGGCAGAAGCAGCTCTGCCG
GAGGGAGCCCGGCCTGGCTGAGACCCTGAGGGATGCTGCGCACCTCGGCCTGCTTGAGTGCCAGTTTCAGTTC
CGGCATGAGCGCTGGAACTGTAGCCTGGAGGGCAGGACGGGCCTGCTCAAGAGAGGCTTCAAAGAGACAGCTT
TCCTGTACGCGGTGTCCTCTGCCGCCCTCACCCACACCCTGGCCCGGGCCTGCAGCGCTCGGCGCATGGAGCG
CTGCACCTGTGATGACTCTCCGGGGCTGGAGAGCCGGCAGGCCTGGCAGTGGGGCGTGTGCGGTGACAACCTC
AAGTACAGCACCAAGTTTCTGAGCAACTTCCTGGGGTCCAAGAGAGGAAACAAGGACCTGCGGGCACGGGCAG
ACGCCCACAATACCCACGTGGGCATCAAGGCTGTGAAGAGTGGCCTCAGGACCACGTGTAAGTGCCATGGCGT
ATCAGGCTCCTGTGCCGTGCGCACCTGCTGGAAGCAGCTCTCCCCGTTCCGTGAGACGGGCCAGGTGCTGAAA
CTGCGCTATGACTCGGCTGTCAAGGTGTCCAGTGCCACCAATGAGGCCTTGGGCCGCCTAGAGCTGTGGGCCC
CTGCCAGGCAGGGCAGCCTCACCAAAGGCCTGGCCCCAAGGTCTGGGGACCTGGTGTACATGGAGGACTCACC
CAGCTTCTGCCGGCCCAGCAAGTACTCACCTGGCACAGCAGGTAGGGTGTGCTCCCGGGAGGCCAGCTGCAGC
AGCCTGTGCTGCGGGCGGGGCTATGACACCCAGAGCCGCCTGGTGGCCTTCTCCTGCCACTGCCAGGTGCAGT
GGTGCTGCTACGTGGAGTGCCAGCAATGTGTGCAGGAGGAGCTTGTGTACACCTGCAAGCACCTCGAGGGC

| | | | |
|---|---|---|---|
| NOV6d, 277582109 | | | |
| Protein Sequence | SEQ ID NO: 64 | 364 aa | MW at 39615.9kD |

TGSTMRPPPALALAGLCLLALPAAAASYFGLTGREVLTPFPGLGTAAAPAQGGAHLKQCDLLKLSRRQKQLCR
REPGLAETLRDAAHLGLLECQFQFRHERWNCSLEGRTGLLKRGFKETAFLYAVSSAALTHTLARACSAGRMER
CTCDDSPGLESRQAWQWGVCGDNLKYSTKFLSNFLGSKRGNKDLRARADAHNTHVGIKAVKSGLRTTCKCHGV
SGSCAVRTCWKQLSPFRETGQVLKLRYDSAVKVSSATNEALGRLELWAPARQGSLTKGLAPRSGDLVYMEDSP
SFCRPSKYSPGTAGRVCSREASCSSLCCGRGYDTQSRLVAFSCHCQVQWCCYVECQQCVQEELVYTCKHLEG

| | | |
|---|---|---|
| NOV6e, 277582117 | SEQ ID NO: 65 | 1024 bp |
| DNA Sequence | ORF Start: at 2 | ORF Stop: end of sequence |

AACCGGATCCTCCTACTTCGGCCTGACCGGGCGGGAAGTCCTGACGCCCTTCCCAGGATTGGGCACTGCGGCA
GCCCCGGCACAGGGCGGGGCCCACCTGAAGCAGTGTGACCTGCTGAAGCTGTCCCGGCGGCAGAAGCAGCTCT
GCCGGAGGGAGCCCGGCCTGGCTGAGACCCTGAGGGATGCTGCGCACCTCGGCCTGCTTGAGTGCCAGTTTCA
GTTCCGGCATGAGCGCTGGAACTGTAGCCTGGAGGGCAGGACGGGCCTGCTCAAGAGAGGCTTCAAAGAGACA
GCTTTCCTGTACGCGGTGTCCTCTGCCGCCCTCACCCACACCCTGGCCCGGGCCTGCAGCGCTGGGCGCATGG
AGCGCTGCACCTGTGATGACTCTCCGGGGCTCGAGAGCCGGCAGGCCTGGCAGTGGGGCGTGTGCGGTGACAA
CCTCAAGTACAGCACCAAGTTTCTGAGCAACTTCCTGGGGTCCAAGAGAGGAAACAAGGACCTGCGGGCACGG
GCAGACGCCCACAATACCCACGTGGGCATCAAGGCTGTGAAGAGTGGCCTCAGGACCACGTGTAAGTGCCATC
GCGTATCAGGCTCCTGTGCCGTGCGCACCTGCTGGAAGCAGCTCTCCCCGTTCCGTGAGACGGGCCAGGTGCT
GAAACTGCGCTATGACTCGGCTGTCAAGGTGTCCAGTGCCACCAATGAGGCCTTGGGCCGCCTAGAGCTGTGG
GCCCCTGCCAGGCAGGGCAGCCTCACCAAAGGCCTGGCCCCAAGGTCTGGGGACCTGGTGTACATGGAGGACT
CACCCAGCTTCTGCCGGCCCAGCAAGTACTCACCTGGCACAGCAGGTAGGGTGTGCTCCCGGGAGGCCAGCTG
CAGCAGCCTGTGCTGCGGGCGGGGCTATGACACCCAGAGCCGCCTGGTGGCCTTCTCCTGCCACTGCCAGGTG
CAGTGGTGCTGCTACGTGGAGTGCCAGCAATGTGTGCAGGAGGAGCTTGTGTACACCTGCAAGCACCTCGAGG
GC

| | | | |
|---|---|---|---|
| NOV6e, 277582117 | | | |
| Protein Sequence | SEQ ID NO: 66 | 341 aa | MW at 37431.2kD |

TGSSYFGLTGREVLTPFPGLGTAAAPAQGGAHLKQCDLLKLSRRQKQLCRREPGLAETLRDAAHLGLLECQFQ
FRHERWNCSLEGRTGLLKRGFKETAFLYAVSSAALTHTLARACSAGRMERCTCDDSPGLESRQAWQWGVCGDN
LKYSTKFLSNFLGSKRGNKDLRARADAHNTHVGIKAVKSGLRTTCKCHGVSCSCAVRTCWKQLSPFRETGQVL
KLRYDSAVKVSSATNEALGRLELWAPARQGSLTKGLAPRSGDLVYMEDSPSFCRPSKYSPGTAGRVCSREASC
SSLCCGRGYDTQSRLVAFSCHCQVQWCCYVECQQCVQEELVYTCKHLEG

| | | |
|---|---|---|
| NOV6f, CG50709-01 | SEQ ID NO: 67 | 1021 bp |
| DNA Sequence | ORF Start: at 3 | ORF Stop: TAG at 996 |

TCCTGACCGGGCGGGAAGTCCTGACGCCCTTCCCAGGATTGGGCACTGCGGCAGCCCCGGCACAGGGCGGGGC
CCACCTGAAGCAGTGTGACCTGCTGAAGCTGTCCCGGCGGCAGAAGCAGCTCTGCCGGAGGGAGCCCGGCCTG
GCTGAGACCCTGAGGGATGCTGCGCACCTCCGCCTGCTTGAGTGCCAGTTTCAGTTCCGGCATGAGCGCTGGA
ACTGTAGCCTGGAGGGCAGGATGGGCCTGCTCAAGAGAGGCTTCAAAGAGACAGCTTTCCTGTACGCGGTGTC
CTCTGCCGCCCTCACCCACACCCTGGCCCGGGCCTGCAGCGCTGGGCGCATGGAGCGCTGCACCTGTGATGAC
TCTCCGGGGCTGGAGAGCCGGCAGGCCTGGCAGTGGGGCGTGTGCGGTGACAACCTCAACTACAGCACCAAGT
TTCTGAGCAACTTCCTGGGGTCCAAGAGAGGAAACAAGGACCTGCGGGCACGGGCAGACGCCCACAATACCCA
CGTGGGCATCAAGGCTGTGAAGAGTGGCCTCAGGACCACGTGTAAGTGCCATGGCGTATCAGGCTCCTGTGCC
GTGCGCACCTGCTGGAAGCAGCTCTCCCCGTTCCGTGAGACGGGCCAGGTGCTCAAACTGCGCTATGACTCGG
CTGTCAAGGTGTCCAGTGCCACCAATGAGGCCTTGGGCCGCCTAGAGCTGTGGGCCCCTGCCAGGCAGGGCAG
CCTCACCAAAGGCCTGGCCCCAAGGTCTGGGGACCTGGTGTACATGGAGGACTCACCCAGCTTCTGCCGGCCC
AGCAAGTACTCACCTGGCACAGCAGGTAGGGTGTGCTCCCGGGAGGCCAGCTGCAGCAGCCTGTGCTGCGGGC
GGGGCTATGACACCCAGAGCCGCCTGGTGGCCTTCTCCTGCCACTGCCAGGTGCAGTGGTGCTGCTACGTGGA
GTGCCAGCAATGTGTGCAGGAGGAGCTTGTGTACACCTGCAAGCACTAGGCCTACTGCCCAGCAAGCCAGTC

| | | | |
|---|---|---|---|
| NOV6f, CG50709-01 | | | |
| Protein Sequence | SEQ ID NO: 68 | 331 aa | MW at 36462.3kD |

LTGREVLTPFPGLGTAAAPAQGGAHLKQCDLLKLSRRQKQLCRREPGLAETLRDAAHLGLLECQFQFRHERWN
CSLEGRMGLLKRGFKETAFLYAVSSAALTHTLARACSAGRMERCTCDDSPGLESRQAWQWGVCGDNLKYSTKF
LSNFLGSKRGNKDLRARADAHNTHVGIKAVKSGLRTTCKCHGVSGSCAVRTCWKQLSPFRETGQVLKLRYDSA
VKVSSATNEALGRLELWAPARQGSLTKGLAPRSGDLVYMEDSPSFCRPSKYSPGTAGRVCSREASCSSLCCGR
GYDTQSRLVAFSCHCQVQWCCYVECQQCVQEELVYTCKH

| | | |
|---|---|---|
| NOV6g, CG50709-02 | SEQ ID NO: 69 | 933 bp |
| DNA Sequence | ORF Start: ATG at 274 | ORF Stop: TAG at 928 |

GGGGCCCACCTGAAGCAGTGTGACCTGCTGAAGCTGTCCCGGCGGCAGAAGCAGCTCTGCCGGAGGGAGCCCG
GCCTGGCTGAGACCCTGAGGGATGCTGCGCACCTCGGCCTGCTTGAGTGCCAGTTTCAGTTCCGGCATGAGCG
CTGGAACTGTAGCCTGGAGGGCAGGACGGGCCTGCTCAAGAGAGGCTTCAAAGAGACAGCTTTCCTGTACGCG
GTGTCCTCTGCCGCCCTCACCCACACCCTGGCCCGGGCCTGCAGCGCTGGGCGCATGGAGCGCTGCACCTGTG
ATGACTCTCCGGGGCTGGAGAGCCGGCAGGCCTGGCAGTGGGGCGTGTGCGGTGACAACCTCAAGTACAGCAC
CAAGTTTCTGAGCAACTTCCTGGGGTCCAAGAGAGGAAACAAGGACCTGCGGGCACGGGCAGACGCCCACAAT
ACCCACGTGGGCATCAAGGCTGTGAAGAGTGGCCTCAGGACCACGTGTAAGTGCCATGGCGTATCAGGCTCCT
GTGCCGTGCGCACCTGCTGGAAGCAGCTCTCCCCGTTCCGTGAGACGGGCCAGGTGCTGAAACTGCGCTATGA
CTCGGCTGTCAAGGTGTCCAGTGCCACCAATGAGGCCTTGGGCCGCCTAGAGCTGTGGGCCCCTGCCAGGCAG
GGCAGCCTCACCAAAGGCCTGGCCCCAAGGTCTGGGGACCTGGTGTACATGGAGGACTCACCCAGCTTCTGCC
GGCCCAGCAAGTACTCACCTGGCACAGCAGGTAGGGTGTGCTCCCGGGAGGCCAGCTGCAGCAGCCTGTGCTG
CGGGCGGGGCTATGACACCCAGAGCCGCCTGGTGGCCTTCTCCTGCCACTGCCAGGTGCAGTGGTGCTGCTAC
GTGGAGTGCCAGCAATGTGTGCAGGAGGAGCTGGTGTACACCTGCAAGCACTAGGCC

| | | | |
|---|---|---|---|
| NOV6g, CG50709-02 | | | |
| Protein Sequence | SEQ ID NO: 70 | 218 aa | MW at 24076.1kD |

MERCTCDDSPGLESRQAWQWGVCGDNLKYSTKFLSNFLGSKRGNKDLRARADAHNTHVGIKAVKSGLRTTCKC
HGVSGSCAVRTCWKQLSPFRETGQVLKLRYDSAVKVSSATNEALGRLELWAPARQGSLTKGLAPRSGDLVYME
DSPSFCRPSKYSPGTAGRVCSREASCSSLCCGRGYDTQSRLVAFSCHCQVQWCCYVECQQCVQEELVYTCKH

| | | |
|---|---|---|
| NOV6h, CG50709-04 | SEQ ID NO: 71 | 849 bp |
| DNA Sequence | ORF Start: at 1 | ORF Stop: end of sequence |

AAGCAGTGTGACCTGCTGAAGCTGTCCCGGCGGCAGAAGCAGCTCTGCCGGAGGGAGCCCGGCCTGGCTGAGA
CCCTGAGGGATGCTGCGCACCTCGGCCTGCTTGAGTGCCAGTTTCAGTTCCGGCATGAGCGCTGGAACTCTAG
CCTGGAGGGCAGGATGGGCCTGCTCAAGAGAGGCTTCAAAGAGACAGCTTTCCTGTACGCGGTGTCCTCTGCC
GCCCTCACCCACACCCTGGCCCGGGCCTGCAGCGCTGGGCGCATGGAGCGCTGCACCTGTGATGACTCTCCGG
GGCTGGAGAGCCGGCAGGCCTGGCAGTGGGGCGTGTGCGGTGACAACCTCAAGTACAGCACCAAGTTTCTGAG
CAACTTCCTGGGGTCCAAGAGAGGAAACAAGGACCTGCGGGCACGGGCAGACGCCCACAATACCCACGTGGGC
ATCAAGGCTGTGAAGAGTGGCCTCAGGACCACGTGTAAGTGCCATGGCGTATCAGGCTCCTGTGCCGTGCGCA
CCTGCTGGAAGCAGCTCTCCCCGTTCCGTGAGACGGGCCAGGTGCTGAAACTGCGCTATGACTCGGCTGTCAA
GGTGTCCAGTGCCACCAATGAGGCCTTGGGCCGCCTAGAGCTGTGGGCCCCTGCCAGGCAGGGCAGCCTCACC
AAAGGCCTGGCCCCAAGGTCTGGGGACCTGGTGTACATGGAGGACTCACCCAGCTTCTGCCGGCCCAGCAAGT
ACTCACCTGGCACAGCAGGTAGGGTGTGCTCCCGGGAGGCCAGCTGCAGCAGCCTGTGCTGCGGGCGGGGCTA
TGACACCCAGAGCCGCCTGGTGGCCTTCTCCTGCCACTGCCAGGTG

| | | | |
|---|---|---|---|
| NOV6h, CG50709-04 | | | |
| Protein Sequence | SEQ ID NO: 72 | 283 aa | MW at 31272.4kD |

KQCDLLKLSRRQKQLCRREPGLAETLRDAAHLGLLECQFQFRHERWNCSLEGRMGLLKRGFKETAFLYAVSSA
ALTHTLARACSAGRMERCTCDDSPGLESRQAWQWGVCGDNLKYSTKFLSNFLGSKRGNKDLRARADAHNTHVG
IKAVKSGLRTTCKCHGVSGSCAVRTCWKQLSPFRETGQVLKLRYDSAVKVSSATNEALGRLELWAPARQGSLT
KGLAPRSGDLVYMEDSPSFCRPSKYSPGTAGRVCSREASCSSLCCGRGYDTQSRLVAFSCHCQV

| | | |
|---|---|---|
| NOV6i, CG50709-06 | SEQ ID NO: 73 | 1093 bp |
| DNA Sequence | ORF Start: ATG at 14 | ORF Stop: end of sequence |

CACCGGATCCACCATGCGCCCCCCGCCCGCGCTGGCCCTGGCCGGGCTCTGCCTGCTGGCGCTGCCCGCCGCC
GCCGCCTCCTACTTCGGCCTGACCGGGCGGGAAGTCCTGACGCCCTTCCCAGGATTGGGCACTGCGGCAGCCC
CGGCACAGGGCGGGGCCCACCTGAAGCAGTGTGACCTGCTGAAGCTGTCCCGGCGGCAGAAGCAGCTCTGCCG
GAGGGAGCCCGGCCTGGCTGAGACCCTGAGGGATGCTGCGCACCTCGGCCTGCTTGAGTGCCAGTTTCAGTTC
CGGCATGAGCGCTGGAACTGTAGCCTGGAGGGCAGGACGGGCCTGCTCAAGAGAGGCTTCAAAGAGACAGCTT
TCCTGTACGCGGTGTCCTCTGCCGCCCTCACCCACACCCTGGCCCGGGCCTGCAGCGCTGGGCGCATGGAGCG
CTGCACCTGTGATGACTCTCCGGGGCTGGAGAGCCGGCAGGCCTGGCAGTGGGGCGTGTGCGGTGACAACCTC
AAGTACAGCACCAAGTTTCTGAGCAACTTCCTGGGGTCCAAGAGAGGAAACAAGGACCTGCGGGCACGGGCAG
ACGCCCACAATACCCACGTGGGCATCAAGGCTGTGAAGAGTGGCCTCAGGACCACGTGTAAGTGCCATGGCGT
ATCAGGCTCCTGTGCCGTGCGCACCTGCTGGAAGCAGCTCTCCCCGTTCCGTGAGACGGGCCAGGTGCTGAAA
CTGCGCTATGACTCGGCTGTCAAGGTGTCCAGTGCCACCAATGAGGCCTTGGGCCGCCTAGAGCTGTGGGCCC
CTGCCAGGCAGGGCAGCCTCACCAAAGGCCTGGCCCCAAGGTCTGGGGACCTGGTGTACATGGAGGACTCACC
CAGCTTCTGCCGGCCCAGCAAGTACTCACCTGGCACAGCAGGTAGGGTGTGCTCCCGGGAGGCCAGCTGCAGC
AGCCTGTGCTGCGGGCGGGGCTATGACACCCAGAGCCGCCTGGTGGCCTTCTCCTGCCACTGCCAGGTGCAGT
GGTGCTGCTACGTGGAGTGCCAGCAATGTGTGCAGGAGGAGCTTGTGTACACCTGCAAGCACCTCGAGGGC

| | | | |
|---|---|---|---|
| NOV6i, CG50709-06 | | | |
| Protein Sequence | SEQ ID NO: 74 | 360 aa | MW at 39269.6kD |

MRPPPALALAGLCLLALPAAAASYFGLTGREVLTPFPGLGTAAAPAQGGAHLKQCDLLKLSRRQKQLCRREPG
LAETLRDAAHLGLLECQFQFRHERWNCSLEGRTGLLKRGFKETAFLYAVSSAALTHTLARACSAGRMERCTCD
DSPGLESRQAWQWGVCGDNLKYSTKFLSNFLGSKRGNKDLRARADAHNTHVGIKAVKSGLRTTCKCHGVSGSC
AVRTCWKQLSPFRETGQVLKLRYDSAVKVSSATNEALGRLELWAPARQGSLTKGLAPRSGDLVYMEDSPSFCR
PSKYSPGTAGRVCSREASCSSLCCGRGYDTQSRLVAFSCHCQVQWCCYVECQQCVQEELVYTCKHLEG

| | | |
|---|---|---|
| NOV6j, CG50709-07 | SEQ ID NO: 75 | 1024 bp |
| DNA Sequence | ORF Start: at 2 | ORF Stop: end of sequence |

AACCGGATCCTCCTACTTCGGCCTGACCGGGCGGGAAGTCCTGACGCCCTTCCCAGGATTGGGCACTGCGGCA
GCCCCGGCACAGGGCGGGGCCCACCTGAAGCAGTGTGACCTGCTGAAGCTGTCCCGGCGGCAGAAGCAGCTCT
GCCGGAGGGAGCCCGGCCTGGCTGAGACCCTGAGGGATGCTGCGCACCTCGGCCTGCTTGAGTGCCAGTTTCA
GTTCCGGCATGAGCGCTGGAACTGTAGCCTGGAGGGCAGGACGGGCCTGCTCAAGAGAGGCTTCAAAGAGACA
GCTTTCCTGTACGCGGTGTCCTCTGCCGCCCTCACCCACACCCTGGCCCGGGCCTGCAGCGCTGGGCGCATGG
AGCGCTGCACCTGTGATGACTCTCCGGGGCTGGAGAGCCGGCAGGCCTGGCAGTGGGGCGTGTGCGGTGACAA
CCTCAAGTACAGCACCAAGTTTCTGAGCAACTTCCTGGGGTCCAAGAGAGGAAACAAGGACCTGCGGGCACGG
GCAGACGCCCACAATACCCACGTGGGCATCAAGGCTGTGAAGAGTGGCCTCAGGACCACGTGTAAGTGCCATG
GCGTATCAGGCTCCTGTGCCGTGCGCACCTGCTGGAAGCAGCTCTCCCCGTTCCGTGAGACGGGCCAGGTGCT
GAAACTGCGCTATGACTCGGCTGTCAAGGTGTCCAGTGCCACCAATGAGGCCTTGGGCCGCCTAGAGCTGTGG
GCCCCTGCCAGGCAGGGCAGCCTCACCAAAGGCCTGGCCCCAAGGTCTGGGGACCTGGTGTACATGGAGGACT
CACCCAGCTTCTGCCGGCCCAGCAAGTACTCACCTGGCACAGCAGGTAGGGTGTGCTCCCGGGAGGCCAGCTG
CAGCAGCCTGTGCTGCGGGCGGGGCTATGACACCCAGAGCCGCCTGGTGGCCTTCTCCTGCCACTGCCAGGTG
CAGTGGTGCTGCTACGTGGAGTGCCAGCAATGTGTGCAGGAGGAGCTTGTGTACACCTGCAAGCACCTCGAGG
GC

| | | | |
|---|---|---|---|
| NOV6j, CG50709-07 | | | |
| Protein Sequence | SEQ ID NO: 76 | 341 aa | MW at 37431.2kD |

TGSSYFGLTGREVLTPFPGLGTAAAPAQGGAHLKQCDLLKLSRRQKQLCRREPGLAETLRDAAHLGLLECQFQ
FRHERWNCSLEGRTGLLKRGFKETAFLYAVSSAALTHTLARACSAGRMERCTCDDSPGLESRQAWQWGVCGDN
LKYSTKFLSNFLGSKRGNKDLRARADAHNTHVGIKAVKSGLRTTCKCHGVSGSCAVRTCWKQLSPFRETGQVL
KLRYDSAVKVSSATNEALGRLELWAPARQGSLTKGLAPRSGDLVYMEDSPSFCRPSKYSPGTAGRVCSREASC
SSLCCGRGYDTQSRLVAFSCHCQVQWCCYVECQQCVQEELVYTCKHLEG

| | | |
|---|---|---|
| | SEQ ID NO: 77 | 993 bp |
| NOV6k, SNP13381605 of | ORF Start: at 1 | ORF Stop: end of sequence |
| CG50709-03, DNA Sequence | SNP Pos: 653 | SNP Change: C to T |

CTGACCGGGCGGGAAGTCCTGACGCCCTTCCCAGGATTGGGCACTGCGGCAGCCCCGGCACAGGGCGGGGCCC
ACCTGAAGCAGTGTGACCTGCTGAAGCTGTCCCGGCGGCAGAAGCAGCTCTGCCGGAGGGAGCCCGGCCTGGC
TGAGACCCTGAGGGATGCTGCGCACCTCGGCCTGCTTGAGTGCCAGTTTCAGTTCCGGCATGAGCGCTGGAAC
TGTAGCCTGGAGGGCAGGACGGGCCTGCTCAAGAGAGGCTTCAAAGAGACAGCTTTCCTGTACGCGGTGTCCT
CTGCCGCCCTCACCCACACCCTGGCCCGGGCCTGCAGCGCTGGGCGCATGGAGCGCTGCACCTGTGATGACTC
TCCGGGGCTGGAGAGCCGACAGGCCTGGCAATGGGGCGTGTGCGGTGACAACCTCAAGTACAGCACCAAGTTT
CTGAGCAACTTCCTGGGGTCCAAGAGAGGAAACAAGGACCTGCGGGCACGGGCAGACGCCCACAATACCCACG
TGGGCATCAAGGCTGTGAAGAGTGGCCTCAGGACCACGTGTAAGTGCCATGGCGTATCAGGCTCCTGTGCCGT
GCGCACCTGCTGGAAGCAGCTCTCCCCGTTCCGTGAGACGGGCCAGGTGCTGAAACTGCGCTATGACTTGGCT
GTCAAGGTGTCCAGTGCCACCAATGAGGCCTTGGGCCGCCTAGAGCTGTGGGCCCCTGCCAGGCAGGGCAGCC
TCACCAAAGGCCTGGCCCCAAGGTCTGGGGACCTGGTGTACATGGAGGACTCACCCAGCTTCTGCCGGCCCAG
CAAGTACTCACCTGGCACAGCAGGTAGGGTGTGCTCCCGGGAGGCCAGCTGCAGCAGCCTGTGCTGCGGGCGG
GGCTATGACACCCAGAGCCGCCTGGTGGCCTTCTCCTGCCACTGCCAGGTGCAGTGGTGCTGCTACGTGGAGT
GCCAGCAATGTGTGCAGGAGGAGCTTGTGTACACCTGCAAGCAC

| | | | |
|---|---|---|---|
| NOV6k, SNP13381605 of | SEQ ID NO: 78 | | MW at 36458.3kD |
| CG50709-03, Protein Sequence | SNP Pos: 218 | 331 aa | SNP Change: Ser to Leu |

LTGREVLTPFPGLGTAAAPAQGGAHLKQCDLLKLSRRQKQLCRREPGLAETLRDAAHLGLLECQFQFRHERWN
CSLEGRTGLLKRGFKETAFLYAVSSAALTHTLARACSAGRMERCTCDDSPGLESRQAWQWGVCGDNLKYSTKF
LSNFLGSKRGNKDLRARADAHNTHVGIKAVKSGLRTTCKCHGVSGSCAVRTCWKQLSPFRETGQVLKLRYDLA
VKVSSATNEALGRLELWAPARQGSLTKGLAPRSGDLVYMEDSPSFCRPSKYSPGTAGRVCSREASCSSLCCGR
GYDTQSRLVAFSCHCQVQWCCYVECQQCVQEELVYTCKH

| | | |
|---|---|---|
| | SEQ ID NO: 79 | 993 bp |
| NOV6l, SNP13381606 of | ORF Start: at 1 | ORF Stop: end of sequence |
| CG50709-03, DNA Sequence | SNP Pos: 743 | SNP Change: T to C |

CTGACCGGGCGGGAAGTCCTGACGCCCTTCCCAGGATTGGGCACTGCGGCAGCCCCGGCACAGGGCGGGGCCC
ACCTGAAGCAGTGTGACCTGCTGAAGCTGTCCCGGCGGCAGAAGCAGCTCTGCCGGAGGGAGCCCGGCCTGGC
TGAGACCCTGAGGGATGCTGCGCACCTCGGCCTGCTTGAGTGCCAGTTTCAGTTCCGGCATGAGCGCTGGAAC
TGTAGCCTGGAGGGCAGGACGGGCCTGCTCAAGAGAGGCTTCAAAGAGACAGCTTTCCTGTACGCGGTGTCCT
CTGCCGCCCTCACCCACACCCTGGCCCGGGCCTGCAGCGCTGGGCGCATGGAGCGCTGCACCTGTGATGACTC
TCCGGGGCTGGAGAGCCGACAGGCCTGGCAATGGGGCGTGTGCGGTGACAACCTCAAGTACAGCACCAAGTTT
CTGAGCAACTTCCTGGGGTCCAAGAGAGGAAACAAGGACCTGCGGGCACGGGCAGACGCCCACAATACCCACG
TGGGCATCAAGGCTGTGAAGAGTGGCCTCAGGACCACGTGTAAGTGCCATGGCGTATCAGGCTCCTGTGCCGT
GCGCACCTGCTGGAAGCAGCTCTCCCCGTTCCGTGAGACGGGCCAGGTGCTGAAACTGCGCTATGACTCGGCT
GTCAAGGTGTCCAGTGCCACCAATGAGGCCTTGGGCCGCCTAGAGCTGTGGGCCCCTGCCAGGCAGGGCAGCC
TCACCAAAGGCCCGGCCCCAAGGTCTGGGGACCTGGTGTACATGGAGGACTCACCCAGCTTCTGCCGGCCCAG
CAAGTACTCACCTGGCACAGCAGGTAGGGTGTGCTCCCGGGAGGCCAGCTGCAGCAGCCTGTGCTGCGGGCGG
GGCTATGACACCCAGAGCCGCCTGGTGGCCTTCTCCTGCCACTGCCAGGTGCAGTGGTGCTGCTACGTGGAGT
GCCAGCAATGTGTGCAGGAGGAGCTTGTGTACACCTGCAAGCAC

| | | | |
|---|---|---|---|
| NOV6l, SNP13381606 of | SEQ ID NO: 80 | | MW at 36416.2kD |
| CG50709-03, Protein Sequence | SNP Pos: 248 | 331 aa | ISNP Change: Leu to Pro |

LTGREVLTPFPGLGTAAAPAQGGAHLKQCDLLKLSRRQKQLCRREPGLAETLRDAAHLGLLECQFQFRHERWN
CSLEGRTGLLKRGFKETAFLYAVSSAALTHTLARACSAGRMERCTCDDSPGLESRQAWQWGVCGDNLKYSTKF
LSNFLGSKRGNKDLRARADAHNTHVGIKAVKSGLRTTCKCHGVSGSCAVRTCWKQLSPFRETGQVLKLRYDSA
VKVSSATNEALGRLELWAPARQGSLTKGPAPRSGDLVYMEDSPSFCRPSKYSPGTAGRVCSREASCSSLCCGR
GYDTQSRLVAFSCHCQVQWCCYVECQQCVQEELVYTCKH

| | | |
|---|---|---|
| | SEQ ID NO: 81 | 993 bp |
| NOV6m, SNP13378337 of | ORF Start: at 1 | ORF Stop: end of sequence |
| CG50709-03, DNA Sequence | SNP Pos: 764 | SNP Change: T to C |

CTGACCGGGCGGGAAGTCCTGACGCCCTTCCCAGGATTGGGCACTGCGGCAGCCCCGGCACAGGGCGGGGCCC
ACCTGAAGCAGTGTGACCTGCTGAAGCTGTCCCGGCGGCAGAAGCAGCTCTGCCGGAGGGAGCCCGGCCTGGC
TGAGACCCTGAGGGATGCTGCGCACCTCGGCCTGCTTGAGTGCCAGTTTCAGTTCCGGCATGAGCGCTGGAAC
TGTAGCCTGGAGGGCAGGACGGGCCTGCTCAAGAGAGGCTTCAAAGAGACAGCTTTCCTGTACGCGGTGTCCT
CTGCCGCCCTCACCCACACCCTGGCCCGGGCCTGCAGCGCTGGGCGCATGGAGCGCTGCACCTCTGATGACTC
TCCGGGGCTGGAGAGCCGACAGGCCTGGCAATGGGGCGTGTGCGGTGACAACCTCAAGTACAGCACCAAGTTT
CTGAGCAACTTCCTGGGGTCCAAGAGAGGAAACAAGGACCTGCGGGCACGGGCAGACGCCCACAATACCCACG
TGGGCATCAAGGCTGTGAAGAGTGGCCTCAGGACCACGTGTAAGTGCCATGGCGTATCAGGCTCCTGTGCCGT
GCGCACCTGCTGGAAGCAGCTCTCCCCGTTCCGTGAGACGGGCCAGGTGCTGAAACTGCGCTATGACTCGGCT
GTCAAGGTGTCCAGTGCCACCAATGAGGCCTTGGGCCGCCTAGAGCTGTGGGCCCCTGCCAGGCAGGGCAGCC
TCACCAAAGGCCTGGCCCCAAGGTCTGGGGACCCGGTGTACATGGAGGACTCACCCAGCTTCTGCCGGCCCAG
CAAGTACTCACCTGGCACAGCAGGTAGGGTGTGCTCCCGGGAGGCCAGCTGCAGCAGCCTGTGCTGCGGGCGG
GGCTATGACACCCAGAGCCGCCTGGTGGCCTTCTCCTGCCACTGCCAGGTGCAGTGGTGCTGCTACGTGGAGT
GCCAGCAATGTGTGCAGGAGGAGCTTGTGTACACCTGCAAGCAC

| | | | |
|---|---|---|---|
| NOV6m, SNP13378337 of | SEQ ID NO: 82 | | MW at 36416.2kD |
| CG50709-03, Protein Sequence | SNP Pos: 255 | 331 aa | SNP Change: Leu to Pro |

LTGREVLTPFPGLGTAAAPAQGGAHLKQCDLLKLSRRQKQLCRREPGLAETLRDAAHLGLLECQFQFRHERWN
CSLEGRTGLLKRGFKETAFLYAVSSAALTHTLARACSAGRMERCTCDDSPGLESRQAWQWGVCGDNLKYSTKF
LSNFLGSKRGNKDLRARADAHNTHVGIKAVKSGLRTTCKCHGVSGSCAVRTCWKQLSPFRETGQVLKLRYDSA
VKVSSATNEALGRLELWAPARQGSLTKGLAPRSGDPVYMEDSPSFCRPSKYSPGTAGRVCSREASCSSLCCGR
GYDTQSRLVAFSCHCQVQWCCYVECQQCVQEELVYTCKH

| | | |
|---|---|---|
| | SEQ ID NO: 83 | 993 bp |
| NOV6n, SNP13381607 of | ORF Start: at 1 | ORF Stop: end of sequence |
| CG50709-03, DNA Sequence | SNP Pos: 799 | SNP Change: C to T |

CTGACCGGGCGGGAAGTCCTGACGCCCTTCCCAGGATTGGGCACTGCGGCAGCCCCGGCACAGGGCGGGGCCC
ACCTGAAGCAGTGTGACCTGCTGAAGCTGTCCCGGCGGCAGAAGCAGCTCTGCCGGAGGGAGCCCGGCCTGGC
TGAGACCCTGAGGGATGCTGCGCACCTCGGCCTGCTTGAGTGCCAGTTTCAGTTCCGGCATGAGCGCTGGAAC
TGTAGCCTGGAGGGCAGGACGGGCCTGCTCAAGAGAGGCTTCAAAGAGACAGCTTTCCTGTACGCGGTGTCCT
CTGCCGCCCTCACCCACACCCTGGCCCGGGCCTGCAGCGCTGGGCGCATGGAGCGCTGCACCTGTGATGACTC
TCCGGGGCTGGAGAGCCGACAGGCCTGGCAATGGGGCGTGTGCGGTGACAACCTCAAGTACAGCACCAAGTTT
CTGAGCAACTTCCTGGGGTCCAAGAGAGGAAACAAGGACCTGCGGGCACGGGCAGACGCCCACAATACCCACG
TGGGCATCAAGGCTGTGAAGAGTGGCCTCAGGACCACGTGTAAGTGCCATGGCGTATCAGGCTCCTGTGCCGT
GCGCACCTGCTGGAAGCAGCTCTCCCCGTTCCGTGAGACGGGCCAGGTGCTGAAACTGCGCTATGACTCGGCT
GTCAAGGTGTCCAGTGCCACCAATGAGGCCTTGGGCCGCCTAGAGCTGTGGGCCCCTGCCAGGCAGGGCAGCC
TCACCAAAGGCCTGGCCCCAAGGTCTGGGGACCTGGTGTACATGGAGGACTCACCCAGCTTCTGCCGGTCCAG
CAAGTACTCACCTGGCACAGCAGGTAGGGTGTGCTCCCGGGAGGCCAGCTGCAGCAGCCTGTGCTGCGGGCGG
GGCTATGACACCCAGAGCCGCCTGGTGGCCTTCTCCTGCCACTGCCAGGTGCAGTGGTGCTGCTACGTGGAGT
GCCAGCAATGTGTGCAGGAGGAGCTTGTGTACACCTGCAAGCAC

| | | | |
|---|---|---|---|
| NOV6n, SNP13381607 of | SEQ ID NO: 84 | | MW at 36422.2kD |
| CG50709-03, Protein Sequence | SNP Pos: 267 | 331 aa | SNP Change: Pro to Ser |

LTGREVLTPFPGLGTAAAPAQGGAHLKQCDLLKLSRRQKQLCRREPGLAETLRDAAHLGLLECQFQFRHERWN
CSLEGRTGLLKRGFKETAFLYAVSSAALTHTLARACSAGRMERCTCDDSPGLESRQAWQWGVCGDNLKYSTKF
LSNFLGSKRGNKDLRARADAHNTHVGIKAVKSGLRTTCKCHGVSGSCAVRTCWKQLSPFRETGQVLKLRYDSA
VKVSSATNEALGRLELWAPARQGSLTKGLAPRSGDLVYMEDSPSFCRSSKYSPGTAGRVCSREASCSSLCCGR
GYDTQSRLVAFSCHCQVQWCCYVECQQCVQEELVYTCKH

| | | |
|---|---|---|
| | SEQ ID NO: 85 | 993 bp |
| NOV6o, SNP13378336 of | ORF Start: at 1 | ORF Stop: end of sequence |
| CG50709-03, DNA Sequence | SNP Pos: 881 | SNP Change: A to G |

CTGACCGGGCCGGAAGTCCTGACGCCCTTCCCAGGATTGGGCACTGCGGCAGCCCCGGCACAGGGCGGGGCCC
ACCTGAAGCAGTGTGACCTGCTGAAGCTGTCCCGGCGGCAGAAGCAGCTCTGCCGGAGGGAGCCCGGCCTGGC
TGAGACCCTGAGGGATGCTGCGCACCTCGGCCTGCTTGAGTGCCAGTTTCAGTTCCGGCATGAGCGCTGGAAC
TGTAGCCTGGAGGGCAGGACGGGCCTGCTCAAGAGAGGCTTCAAAGAGACAGCTTTCCTGTACGCGGTGTCCT
CTGCCGCCCTCACCCACACCCTGGCCCGGGCCTGCAGCGCTGGGCGCATGGAGCGCTGCACCTGTGATGACTC
TCCGGGGCTGGAGAGCCGACAGGCCTGGCAATGGGGCGTGTGCGGTGACAACCTCAAGTACAGCACCAAGTTT
CTGAGCAACTTCCTGGGGTCCAAGAGAGGAAACAAGGACCTGCGGGCACGGGCAGACGCCCACAATACCCACG
TGGGCATCAAGGCTGTGAAGAGTGGCCTCAGGACCACGTGTAAGTGCCATGGCGTATCAGGCTCCTGTGCCGT
GCGCACCTGCTGGAAGCAGCTCTCCCCGTTCCGTGAGACGGGCCAGGTGCTGAAACTGCGCTATGACTCGGCT
GTCAAGGTGTCCAGTGCCACCAATGAGGCCTTGGGCCGCCTAGAGCTGTGGGCCCCTGCCAGGCAGGGCAGCC
TCACCAAAGGCCTGGCCCCAAGGTCTGGGGACCTGGTGTACATGGAGGACTCACCCAGCTTCTGCCGGCCCAG
CAAGTACTCACCTGGCACAGCAGGTAGGGTGTGCTCCCGGGAGGCCAGCTGCAGCAGCCTGTGCTGCGGGCGG
GGCTGTGACACCCAGAGCCGCCTGGTGGCCTTCTCCTGCCACTGCCAGGTGCAGTGGTGCTGCTACGTGCAGT
GCCAGCAATGTGTGCAGGAGGAGCTTGTGTACACCTGCAAGCAC

| | | | |
|---|---|---|---|
| NOV6o, SNP13378336 of | SEQ ID NO: 86 | | MW at 36372.2kD |
| CG50709-03, Protein Sequence | SNP Pos: 294 | 331 aa | SNP Change: Tyr to Cys |

LTGREVLTPFPGLGTAAAPAQGGAHLKQCDLLKLSRRQKQLCRREPGLAETLRDAAHLGLLECQFQFRHERWN
CSLEGRTGLLKRGFKETAFLYAVSSAALTHTLARACSAGRMERCTCDDSPGLESRQAWQWGVCGDNLKYSTKF
LSNFLGSKRGNKDLRARADAHNTHVGIKAVKSGLRTTCKCHGVSGSCAVRTCWKQLSPFRETGQVLKLRYDSA
VKVSSATNEALGRLELWAPARQGSLTKGLAPRSGDLVYMEDSPSFCRPSKYSPGTAGRVCSREASCSSLCCGR
GCDTQSRLVAFSCHCQVQWCCYVECQQCVQEELVYTCKH

| | | |
|---|---|---|
| | SEQ ID NO: 87 | 993 bp |
| NOV6p, SNP13378335 of | ORF Start: at 1 | ORF Stop: end of sequence |
| CG50709-03, DNA Sequence | SNP Pos: 977 | SNP Change: T to C |

CTGACCGGGCGGGAAGTCCTGACGCCCTTCCCAGGATTGGGCACTGCGGCAGCCCCGGCACAGGGCGGGGCCC
ACCTGAAGCAGTGTGACCTGCTGAAGCTGTCCCGGCGGCAGAAGCAGCTCTGCCGGAGGGAGCCCGGCCTGGC
TGAGACCCTGAGGGATGCTGCGCACCTCGGCCTGCTTGAGTGCCAGTTTCAGTTCCGGCATGAGCGCTGGAAC
TGTAGCCTGGAGGGCAGGACGGGCCTGCTCAAGAGAGGCTTCAAAGAGACAGCTTTCCTGTACGCGGTGTCCT
CTGCCGCCCTCACCCACACCCTGGCCCGGGCCTGCAGCGCTGGGCGCATGGAGCGCTGCACCTGTGATGACTC
TCCGGGGCTGGAGAGCCGACAGGCCTGGCAATGGGGCGTGTGCGGTGACAACCTCAAGTACAGCACCAAGTTT
CTGAGCAACTTCCTGGGGTCCAAGAGAGGAAACAAGGACCTGCGGGCACGGGCAGACGCCCACAATACCCACG
TGGGCATCAAGGCTGTGAAGAGTGGCCTCAGGACCACGTGTAAGTGCCATGGCGTATCAGGCTCCTGTGCCGT
GCGCACCTGCTGGAAGCAGCTCTCCCCGTTCCGTGAGACGGGCCAGGTGCTGAAACTGCGCTATGACTCGGCT
GTCAAGGTGTCCAGTGCCACCAATGAGGCCTTGGGCCGCCTAGAGCTGTGGGCCCCTGCCAGGCAGGGCAGCC
TCACCAAAGGCCTGGCCCCAAGGTCTGGGGACCTGGTGTACATGGAGGACTCACCCAGCTTCTGCCGGCCCAG
CAAGTACTCACCTGGCACAGCAGGTAGGGTGTGCTCCCGGGAGGCCAGCTGCAGCAGCCTGTGCTGCGGGCGG
GGCTATGACACCCAGAGCCGCCTGGTGGCCTTCTCCTGCCACTGCCAGGTGCAGTGGTGCTGCTACGTGGACT
GCCAGCAATGTGTGCAGGAGGAGCTTGCGTACACCTGCAAGCAC

| | | | |
|---|---|---|---|
| NOV6p, SNP13378335 of | SEQ ID NO: 88 | | MW at 36404.1kD |
| CG50709-03, Protein Sequence | SNP Pos: 326 | 331 aa | SNP Change: Val to Ala |

LTGREVLTPFPGLGTAAAPAQGGAHLKQCDLLKLSRRQKQLCRREPGLAETLRDAAHLGLLECQFQFRHERWN
CSLEGRTGLLKRGFKETAFLYAVSSAALTHTLARACSAGRMERCTCDDSPGLESRQAWQWGVCGDNLKYSTKF
LSNFLGSKRGNKDLRARADAHNTHVGIKAVKSGLRTTCKCHGVSGSCAVRTCWKQLSPFRETGQVLKLRYDSA
VKVSSATNEALGRLELWAPARQGSLTKGLAPRSGDLVYMEDSPSFCRPSKYSPGTAGRVCSREASCSSLCCGR
GYDTQSRLVAFSCHCQVQWCCYVECQQCVQEELAYTCKH

[0387] A ClustalW comparison of the above protein sequences yields the following sequence alignment shown in Table 6B.

TABLE 6B

| Comparison of the NOV6 protein sequences. | |
|---|---|
| NOV6a | ------------------------------LTGREVLTPFPGLGTAAAPAQGGAHLKQCD |
| NOV6b | ------------------------------------------------------TGSQCD |
| NOV6c | ----MRPPPALALAGLCLLALPAAAASYFGLTGREVLTPFPGLGTAAAPAQGGAHLKQCD |
| NOV6d | TGSTMRPPPALALAGLCLLALPAAAASYFGLTGREVLTPFPGLGTAAAPAQGGAHLKQCD |
| NOV6e | -----------------------TGSSYFGLTGREVLTPFPGLGTAAAPAQGGAHLKQCD |
| NOV6f | ------------------------------LTGREVLTPFPGLGTAAAPAQGGAHLKQCD |
| NOV6g | ------------------------------------------------------------ |
| NOV6h | --------------------------------------------------------KQCD |
| NOV6i | ----MRPPPALALAGLCLLALPAAAASYFGLTGREVLTPFPGLGTAAAPAQGGAHLKQCD |
| NOV6j | -----------------------TGSSYFGLTGREVLTPFPGLGTAAAPAQGGAHLKQCD |
| NOV6a | LLKLSRRQKQLCRREPGLAETLRDAAHLGLLECQFQFRHERWNCSLEGRTGLLKRGFKET |
| NOV6b | LLKLSRRQKQLCRREPGLAETLRDAAHLGLLECQFQFRHERWNCSLEGRTGLLKRGFKET |
| NOV6c | LLKLSRRQKQLCRREPGLAETLRDAAHLGLLECQFQFRHERWNCSLEGRTGLLKRGFKET |
| NOV6d | LLKLSRRQKQLCRREPGLAETLRDAAHLGLLECQFQFRHERWNCSLEGRTGLLKRGFKET |
| NOV6e | LLKLSRRQKQLCRREPGLAETLRDAAHLGLLECQFQFRHERWNCSLEGRTGLLKRGFKET |
| NOV6f | LLKLSRRQKQLCRREPGLAETLRDAAHLGLLECQFQFRHERWNCSLEGRMGLLKRGFKET |
| NOV6g | ------------------------------------------------------------ |
| NOV6h | LLKLSRRQKQLCRREPGLAETLRDAAHLGLLECQFQFRHERWNCSLEGRMGLLKRGFKET |
| NOV6i | LLKLSRRQKQLCRREPGLAETLRDAAHLGLLECQFQFRHERWNCSLEGRTGLLKRGFKET |
| NOV6j | LLKLSRRQKQLCRREPGLAETLRDAAHLGLLECQFQFRHERWNCSLEGRTGLLKRGFKET |
| NOV6a | AFLYAVSSAALTHTLARACSAGRMERCTCDDSPGLESRQAWQWGVCGDNLKYSTKFLSNF |
| NOV6b | AFLYAVSSAALTHTLARACSAGRMERCTCDDSPGLESRQAWQWGVCGDNLKYSTKFLSNF |
| NOV6c | AFLYAVSSAALTHTLARACSAGRMERCTCDDSPGLESRQAWQWGVCGDNLKYSTKFLSNF |
| NOV6d | AFLYAVSSAALTHTLARACSAGRMERCTCDDSPGLESRQAWQWGVCGDNLKYSTKFLSNF |
| NOV6e | AFLYAVSSAALTHTLARACSAGRMERCTCDDSPGLESRQAWQWGVCGDNLKYSTKFLSNF |
| NOV6f | AFLYAVSSAALTHTLARACSAGRMERCTCDDSPGLESRQAWQWGVCGDNLKYSTKFLSNF |
| NOV6g | -----------------------MERCTCDDSPGLESRQAWQWGVCGDNLKYSTKFLSNF |
| NOV6h | AFLYAVSSAALTHTLARACSAGRMERCTCDDSPGLESRQAWQWGVCGDNLKYSTKFLSNF |
| NOV6i | AFLYAVSSAALTHTLARACSAGRMERCTCDDSPGLESRQAWQWGVCGDNLKYSTKFLSNF |
| NOV6j | AFLYAVSSAALTHTLARACSAGRMERCTCDDSPGLESRQAWQWGVCGDNLKYSTKFLSNF |
| NOV6a | LGSKRGNKDLRARADAHNTHVGIKAVKSGLRTTCKCHGVSGSCAVRTCWKQLSPFRETGQ |
| NOV6b | LGSKRGNKDLRARADAHNTHVGIKAVKSGLRTTCKCHGVSGSCAVRTCWKQLSPFRETGQ |
| NOV6c | LGSKRGNKDLRARADAHNTHVGIKAVKSGLRTTCKCHGVSGSCAVRTCWKQLSPFRETGQ |
| NOV6d | LGSKRGNKDLRARADAHNTHVGIKAVKSGLRTTCKCHGVSGSCAVRTCWKQLSPFRETGQ |
| NOV6e | LGSKRGNKDLRARADAHNTHVGIKAVKSGLRTTCKCHGVSGSCAVRTCWKQLSPFRETGQ |
| NOV6f | LGSKRGNKDLRARADAHNTHVGIKAVKSGLRTTCKCHGVSGSCAVRTCWKQLSPFRETGQ |
| NOV6g | LGSKRGNKDLRARADAHNTHVGIKAVKSGLRTTCKCHGVSGSCAVRTCWKQLSPFRETGQ |
| NOV6h | LGSKRGNKDLRARADAHNTHVGIKAVKSGLRTTCKCHGVSGSCAVRTCWKQLSPFRETGQ |
| NOV6i | LGSKRGNKDLRARADAHNTHVGIKAVKSGLRTTCKCHGVSGSCAVRTCWKQLSPFRETGQ |
| NOV6j | LGSKRGNKDLRARADAHNTHVGIKAVKSGLRTTCKCHGVSGSCAVRTCWKQLSPFRETGQ |
| NOV6a | VLKLRYDSAVKVSSATNEALGRLELWAPARQGSLTKGLAPRSGDLVYMEDSPSFCRPSKY |
| NOV6b | VLKLRYDSAVKVSSATNEALGRLELWAPARQGSLTKGLAPRSGDLVYMEDSPSFCRPSKY |
| NOV6c | VLKLRYDSAVKVSSATNEALGRLELWAPARQGSLTKGLAPRSGDLVYMEDSPSFCRPSKY |
| NOV6d | VLKLRYDSAVKVSSATNEALGRLELWAPARQGSLTKGLAPRSGDLVYMEDSPSFCRPSKY |
| NOV6e | VLKLRYDSAVKVSSATNEALGRLELWAPARQGSLTKGLAPRSGDLVYMEDSPSFCRPSKY |
| NOV6f | VLKLRYDSAVKVSSATNEALGRLELWAPARQGSLTKGLAPRSGDLVYMEDSPSFCRPSKY |
| NOV6g | VLKLRYDSAVKVSSATNEALGRLELWAPARQGSLTKGLAPRSGDLVYMEDSPSFCRPSKY |
| NOV6h | VLKLRYDSAVKVSSATNEALGRLELWAPARQGSLTKGLAPRSGDLVYMEDSPSFCRPSKY |
| NOV6i | VLKLRYDSAVKVSSATNEALGRLELWAPARQGSLTKGLAPRSGDLVYMEDSPSFCRPSKY |
| NOV6j | VLKLRYDSAVKVSSATNEALGRLELWAPARQGSLTKGLAPRSGDLVYMEDSPSFCRPSKY |
| NOV6a | SPGTAGRVCSREASCSSLCCGRGYDTQSRLVAFSCHCQVQWCCYVECQQCVQEELVYTCK |
| NOV6b | SPGTAGRVCSREASCSSLCCGRGYDTQSRLVAFSCHCQVQWCCYVECQQCVQEELVYTCK |
| NOV6c | SPGTAGRVCSREASCSSLCCGRGYDTQSRLVAFSCHCQVQWCCYVECQQCVQEELVYTCK |
| NOV6d | SPGTAGRVCSREASCSSLCCGRGYDTQSRLVAFSCHCQVQWCCYVECQQCVQEELVYTCK |
| NOV6e | SPGTAGRVCSREASCSSLCCGRGYDTQSRLVAFSCHCQVQWCCYVECQQCVQEELVYTCK |
| NOV6f | SPGTAGRVCSREASCSSLCCCRGYDTQSRLVAFSCHCQVQWCCYVECQQCVQEELVYTCK |
| NOV6g | SPGTAGRVCSREASCSSLCCGRGYDTQSRLVAFSCHCQVQWCCYVECQQCVQEELVYTCK |
| NOV6h | SPGTAGRVCSREASCSSLCCGRGYDTQSRLVAFSCHCQV--------------------- |
| NOV6i | SPGTAGRVCSREASCSSLCCGRGYDTQSRLVAFSCHCQVQWCCYVECQQCVQEELVYTCK |
| NOV6j | SPGTAGRVCSREASCSSLCCGRGYDTQSRLVAFSCHCQVQWCCYVECQQCVQEELVYTCK |
| NOV6a | H--- |
| NOV6b | LEG- |
| NOV6c | H--- |
| NOV6d | HLEG |
| NOV6e | HLEG |
| NOV6f | H--- |
| NOV6g | H--- |
| NOV6h | ---- |
| NOV6i | HLEG |
| NOV6j | HLEG |
| NOV6a | (SEQ ID NO: 58) |
| NOV6b | (SEQ ID NO: 60) |
| NOV6c | (SEQ ID NO: 62) |
| NOV6d | (SEQ ID NO: 64) |
| NOV6e | (SEQ ID NO: 66) |
| NOV6f | (SEQ ID NO: 68) |
| NOV6g | (SEQ ID NO: 70) |
| NOV6h | (SEQ ID NO: 72) |
| NOV6i | (SEQ ID NO: 74) |
| NOV6j | (SEQ ID NO: 76) |

[0388] Further analysis of the NOV6a protein yielded the following properties shown in Table 6C.

TABLE 6C
Protein Sequence Properties NOV6a

| SignalP | No Known Signal Sequence Predicted | | | |
|---|---|---|---|---|
| analysis: | | | | |
| PSORT II | PSG: a new signal peptide prediction method | | | |
| analysis: | N-region: length 5; pos. chg 1; neg. chg 1 | | | |
| | H-region: length 21; peak value 7.18 | | | |
| | PSG score: 2.78 | | | |
| | GvH: von Heijne's method for signal seq. recognition | | | |
| | GvH score (threshold: −2.1): −5.38 | | | |
| | possible cleavage site: between 22 and 23 | | | |
| | >>> Seems to have no N-terminal signal peptide | | | |
| | ALOM: Klein et al's method for TM region allocation | | | |
| | Init position for calculation: 1 | | | |
| | Tentative number of TMS(s) for the threshold 0.5: 0 | | | |
| | number of TMS(s) . . . fixed | | | |
| | PERIPHERAL | Likelihood = 4.08 (at 90) | | |
| | ALOM score: 4.08 (number of TMSs: 0) | | | |
| | MTOP: Prediction of membrane topology (Hartmann et al.) | | | |
| | Center position for calculation: 6 | | | |
| | Charge difference: 3.5 C(4.5)-N(1.0) | | | |
| | C > N: C-terminal side will be inside | | | |
| | >>>Caution: Inconsistent mtop result with signal peptide | | | |
| | MITDISC: discrimination of mitochondrial targeting seq | | | |
| | R content: | 1 | Hyd Moment(75): | 11.91 |
| | Hyd Moment(95): | 8.21 | G content: | 5 |
| | D/E content: | 2 | S/T content: | 3 |

Score: −6.56
Gavel: prediction of cleavage sites for mitochondrial preseq
R-2 motif at 53 CRR|EP
NUCDISC: discrimination of nuclear localization signals
pat4: none
pat7: none
bipartite: none
content of basic residues: 14.2%
NLS Score: −0.47
KDEL: ER retention motif in the C-terminus: none
ER Membrane Retention Signals:
XXRR-like motif in the N-terminus: TGRE
KKXX-like motif in the C-terminus: YTCK
SKL: peroxisomal targeting signal in the C-terminus: none
PTS2: 2nd peroxisomal targeting signal: found
KLSRRQKQL at 33
VAC: possible vacuolar targeting motif: none
RNA-binding motif: none
Actinin-type actin-binding motif:
type 1: none
type 2: none
NMYR: N-myristoylation pattern: none
Prenylation motif: none
memYQRL: transport motif from cell surface to Golgi: none
Tyrosines in the tail: none
Dileucine motif in the tail: none
checking 63 PROSITE DNA binding motifs: none
checking 71 PROSITE ribosomal protein motifs: none
checking 33 PROSITE prokaryotic DNA binding motifs: none
NNCN: Reinhardt's method for Cytoplasmic/Nuclear discrimination
Prediction: nuclear
Reliability: 76.7
COIL: Lupas's algorithm to detect coiled-coil regions
total: 0 residues
Final Results (k = 9/23):
78.3%: nuclear
13.0%: mitochondrial
8.7%: cytoplasmic
>> prediction for CG50709-03 is nuc (k = 23)

[0389] A search of the NOV6a protein against the Geneseq database, a proprietary database that contains sequences published in patents and patent publication, yielded several homologous proteins shown in Table 6D.

TABLE 6D
Geneseq Results for NOV6a

| | | NOV6a | Identities/ | |
|---|---|---|---|---|
| | | Residues/ | Similarities for | |
| Geneseq | Protein/Organism/Length [Patent #, | Match | the Matched | Expect |
| Identifier | Date] | Residues | Region | Value |
| AAE17306 | Human WNT15 protein, | 1 . . . 331 | 330/331 (99%) | 0.0 |
| | sbg389686WNT15a #2 - Homo | 31 . . . 361 | 330/331 (99%) | |
| | sapiens, 361 aa. [WO200198342-A1, | | | |
| | 27 DEC. 2001] | | | |
| AAE17305 | Human WNT15 protein, | 1 . . . 331 | 330/331 (99%) | 0.0 |
| | sbg389686WNT15a #1 - Homo | 17 . . . 347 | 330/331 (99%) | |
| | sapiens, 704 aa. [WO200198342-A1, | | | |
| | 27 DEC. 2001] | | | |
| ABB77769 | Amino acid sequence of human Wnt | 1 . . . 331 | 330/331 (99%) | 0.0 |
| | (Zwnt5) polypeptide variant - Homo | 4 . . . 334 | 330/331 (99%) | |
| | sapiens, 334 aa. [WO200231148-A2, | | | |
| | 18 APR. 2002] | | | |
| ABB77768 | Amino acid sequence of human Wnt | 1 . . . 331 | 330/331 (99%) | 0.0 |
| | (Zwnt5) polypeptide - Homo sapiens, | 31 . . . 361 | 330/331 (99%) | |
| | 361 aa. [WO200231148-A2, | | | |
| | 18 APR. 2002] | | | |
| ABB83080 | Wnt family related protein 2 - Homo | 1 . . . 331 | 330/331 (99%) | 0.0 |
| | sapiens, 363 aa. [WO200250278-A2, | 33 . . . 363 | 330/331 (99%) | |
| | 27 JUN. 2002] | | | |

[0390] In a BLAST search of public sequence databases, the NOV6a protein was found to have homology to the proteins shown in the BLASTP data in Table 6E.

TABLE 6E
Public BLASTP Results for NOV6a

| | | NOV6a | | |
|---|---|---|---|---|
| Protein | | Residues/ | Identities/ | |
| Accession | | Match | Similarities for the | Expect |
| Number | Protein/Organism/Length | Residues | Matched Portion | Value |
| O14905 | Wnt-9b protein precursor (Wnt-15) | 1 . . . 331 | 331/331 (100%) | 0.0 |
| | (Wnt-14b) - Homo sapiens (Human), | 27 . . . 357 | 331/331 (100%) | |
| | 357 aa. | | | |
| Q8C718 | WNT14B - Mus musculus (Mouse), | 1 . . . 330 | 310/330 (93%) | 0.0 |
| | 359 aa. | 29 . . . 358 | 319/330 (95%) | |
| O35468 | Wnt-9b protein precursor (Wnt-15) | 1 . . . 330 | 310/330 (93%) | 0.0 |
| | (Wnt-14b) - Mus musculus (Mouse), | 29 . . . 358 | 319/330 (95%) | |
| | 359 aa. | | | |
| O14904 | Wnt-9a protein precursor (Wnt-14) - | 1 . . . 330 | 209/335 (62%) | e−124 |
| | Homo sapiens (Human), 365 aa. | 33 . . . 364 | 255/335 (75%) | |
| Q8R5M2 | Wnt-9a protein precursor (Wnt-14) - | 1 . . . 330 | 208/335 (62%) | e−123 |
| | Mus musculus (Mouse), 365 aa. | 33 . . . 364 | 255/335 (76%) | |

[0391] PFam analysis predicts that the NOV6a protein contains the domains shown in the Table 6F.

TABLE 6F
Domain Analysis of NOV6a

| | | Identities/ | |
|---|---|---|---|
| Pfam | | Similarities | Expect |
| Domain | NOV6a Match Region | for the Matched Region | Value |
| wnt | 28 . . . 330 | 132/354 (37%) | 2.1e−104 |
| | | 234/354 (66%) | |

### Example 7

[0392] The NOV7 clone was analyzed, and the nucleotide and encoded polypeptide sequences are shown in Table 7A.

TABLE 7A
NOV7 Sequence Analysis

| | | |
|---|---|---|
| NOV7a, CG53054-02 | SEQ ID NO: 89 | 1128 bp |
| DNA Sequence | ORF Start: ATG at 31 | ORF Stop: TGA at 1102 |

TCCCGGCCCTCCGCGCCCTCTCGCGCGGCGATGGCCCCACTCGGATACTTCTTACTCCTCTGCAGCCTGAAGC
AGGCTCTGGGCAGCTACCCGATCTGGTGGCTGACGGGCAGCGAGCCCCTGACCATCCTCCCGCTGACCCTGGA
GCCAGAGGCGGCTGCCCAGGCGCACTACAAGGCCTGCGACCGGCTGAAGCTGGAGCGGAAGCAGCGGCGCATG
TGCCGCCGGGACCCGGGCGTGGCAGAGACGCTGGTGGAGGCCGTGAGCATGAGTGCGCTCGAGTGCCAGTTCC
AGTTCCGCTTTGAGCGCTGGAACTGCACGCTGGAGGGCCGCTACCGGGCCAGCCTGCTCAAGCGAGGTTTCAA
GGAGACTGCCTTCCTCTATGCCATCTCCTCGGCTGGCCTGACGCACGCACTGGCCAAGGCGTGCAGCGCGGGC
CGCATGGAGCGCTGTACCTGCGATGAGGCACCCGACCTGGAGAACCGTGAGGCCTGGCAGTGGGGGGGCTGCG
GAGACAACCTTAAGTACAGCAGCAAGTTCGTCAAGGAATTCCTGGGCAGACGGTCAAGCAAGGATCTGCGAGC
CCGTGTGGACTTCCACAACAACCTCGTGGGTGTGAAGGTGATCAAGGCTGGGGTGGAGACCACCTGCAAGTGC
CACGGCGTGTCAGGCTCATGCACGGTGCGGACCTGCTGGCGGCAGTTGGCGCCTTTCCATGAGGTGGGCAAGC
ATCTGAAGCACAAGTATGAGACGGCACTCAAGGTGGGCAGCACCACCAATGAAGCTGCCGGCGAGGCAGGTGC
CATCTCCCCACCACGGGGCCGTGCCTCGGGGGCAGGTGGCAGCGACCCGCTGCCCCGCACTCCAGAGCTGGTG
CACCTGGATGACTCGCCTAGCTTCTGCCTGGCTGGCCGCTTCTCCCCGGGCACCGCTGGCCGTAGGTGCCACC
GTGAGAAGAACTGCGAGAGCATCTGCTGTGGCCGCGGCCATAACACACAGAGCCGGGTGGTGACAAGGCCCTG
CCAGTGCCAGGTGCGTTGGTGCTGCTATGTGGAGTGCAGGCAGTGCACGCAGCGTGAGGAGGTCTACACCTGC
AAGGGCTGAGTTCCCAGGCCCTGCCAGCCCTGC

| | | | |
|---|---|---|---|
| NOV7a, CG53054-02 | | | |
| Protein Sequence | SEQ ID NO: 90 | 357 aa | MW at 39756.1kD |

MAPLGYFLLLCSLKQALGSYPIWWLTGSEPLTILPLTLEPEAAAQAHYKACDRLKLERKQRRMCRRDPGVAET
LVEAVSMSALECQFQFRFERWNCTLEGRYRASLLKRGFKETAFLYAISSAGLTHALAKACSAGRMERCTCDEA
PDLENREAWQWGGCGDNLKYSSKFVKEFLGRRSSKDLRARVDFHNNLVGVKVIKAGVETTCKCHGVSGSCTVR
TCWRQLAPFHEVGKHLKHKYETALKVGSTTNEAAGEAGAISPPRGRASGAGGSDPLPRTPELVHLDDSPSFCL
AGRFSPGTAGRRCHREKNCESICCGRGHNTQSRVVTRPCQCQVRWCCYVECRQCTQREEVYTCKG

| | | |
|---|---|---|
| NOV7b, 170251039 | SEQ ID NO: 91 | 1029 bp |
| DNA Sequence | ORF Start: at 1 | ORF Stop: end of sequence |

GGATCCAGCTACCCGATCTGGTGGCTGACGGGCAGCGAGCCCCTGACCATCCTCCCGCTGACCCTGGAGCCAG
AGGCGGGCGCCCAGGCGCACTACAAGGCCTGCGACCGGCTGAAGCTGGAGCGGAAGCAGCGGCGCATGTGCCG
CCGGGACCCGGGCGTGGTAGAGACGCTGGTGGAGGCCGTGAGCATGAGTGCGCTCGAGTGCCAGTTCCAGTTC
CGCTTTGAGCGCTGGAACTGCACGCTGGAGGGCCGCTACCGGGCCAGCCTGCTCAAGCGAGGCTTCAAGGAGA
CTGCCTTCCTCTATGCCATCTCCTCGGCTGGCCTGACGCACGCACTGGCCAAGGCGTGCAGCGCGGGCCGCAT
GGAGCGCTGTACCTGCGATGAGGCACCCGACCTGGAGAACCGTGAGGCCTGGCAGTGGGGGGGCTGCGGAGAC
AACCTTAAGTACAGCAGCAAGTTCGTCAAGGAATTCCTGGGCAGACGGTCAAGCAAGCATCTGCGAGCCCGTG
TGCACTTCCACAACAACCTCGTGGGTGTGAAGGTGATCAAGGCTGGGGTGGAGACCACCTGCAAGTGCCACGG
CGTGTCAGGCTCATGCACGGTGCGGACCTGCTGGCGGCAGTTGGCGCCTTTCCATGAGGTGGGCAAGCATCTG
AAGCACAAGTATGAGACGGCACTCAAGGTGGGCAGCACCACCAATGAAGCTGCCGGCGAGGCAGGTGCCATCT
CCCCACCACGGGGCCGTGCCTCGGGGGCAGGTGGCAGCGACCCGCTGCCCCGCACTCCAGAGCTGGTGCACCT
GGATGACTCGCCTAGCTTCTGCCTGGCTGGCCGCTTCTCCCCGGGCACCGCTGGCCGTAGGTGCCACCGTGAG
AAGAACTGCGAGAGCATCTGCTGTGGCCGCGGCCATAACACACAGAGCCGGGTGGTGACAAGGCCCTGCCAGT
GCCAGGTGCGTTGGTGCTGCTATGTGGAGTGCAGGCAGTGCACGCAGCGTGAGGAGGTCTACACCTGCAAGGG
CGTCGAC

| | | | |
|---|---|---|---|
| NOV7b, 170251039 | | | |
| Protein Sequence | SEQ ID NO: 92 | 343 aa | MW at 38208.1kD |

GSSYPIWWLTGSEPLTILPLTLEPEAGAQAHYKACDRLKLERKQRRMCRRDPGVVETLVEAVSMSALECQFQF
RFERWNCTLEGRYRASLLKRGFKETAFLYAISSAGLTHALAKACSAGRMERCTCDEAPDLENREAWQWGGCGD
NLKYSSKFVKEFLGRRSSKDLRARVDFHNNLVGVKVIKAGVETTCKCHGVSGSCTVRTCWRQLAPFHEVGKHL
KHKYETALKVGSTTNEAAGEAGAISPPRGRASGAGGSDPLPRTPELVHLDDSPSFCLAGRFSPGTAGRRCHRE
KNCESICCGRGHNTQSRVVTRPCQCQVRWCCYVECRQCTQREEVYTCKGVD

| | | |
|---|---|---|
| NOV7c, 170251076 | SEQ ID NO: 93 | 1029 bp |
| DNA Sequence | ORF Start: at 1 | ORF Stop: end of sequence |

GGATCCAGCTACCCGATCTGGTGGCTGACGGGCAGCGACCCCCTGACCATCCTCCCGCTGACCCTGGAGCCAG
AGGCGGCCGCCCAGGCGCACTACAAGGCCTGCGACCGGCTGAAGCTGGAGCGGAAGCAGCGGCGCATGTGCCG
CCCGGACCCGGGCGTGGCAGAGACGCTGGTGGAGGCCGTGAGCATGAGTGCGCTCGAGTGCCAGTTCCAGTTC
CGCTTTGAGCGCTGGAACTGCACGCTGGAGGGCCGCTACCGGGCCAGCCTGCTCAAGCGAGGCTTCAAGGAGA
CTGCCTTCCTCTATGCCATCTCCTCGGCTGGCCTGACGCACGCACTGGCCAAGGCGTGCAGCGCGGGCCGCAT
GGAGCGCTGTACCTGCGATGAGGCACCCGACCTGGAGAACCGTGAGGCCTGGCAGTGGGGGGGCTGCGGAGAC
AACCTTAAGTACAGCAGCAAGTTCGTCAAGGAATTCCTGGGCAGACGGTCAAGCAAGGATCTGCGAGCCCGTG
TGGACTTCCACAACAACCTCGTGGGTGTGAAGGTGATCAAGGCTGGGGTGGAGACCACCTGCAAGTGCCACGG
CGTGTCAGGCTCATGCACGGTGCGGACCTGCTGGCGGCAGTTGGCGCCTTTCCATGAGGTGGGCAAGCATCTG
AAGCACAAGTATGAGACGGCACTCAAGGTGGGCAGCACCACCAATGAAGCTGCCGGCGAGGCAGGTGCCATCT
CCCCACCACGGGGCCGTGCCTCGGGGGCAGGTGGCAGCGACCCGCTGCCCCGCACTCCAGAGCTGGTGCACCT
GGATGACTCGCCTAGCTTCTGCCTGGCTGGCCGCTTCTCCCCGGGCACCGCTGGCCGTAGGTGCCACCGTGAG
AAGAACTGCGAGAGCATCTGCTGTGGCCGCGGCCATAACACACAGAGCCGGGTGGTGACAAGGCCCTGCCAGT
GCCAGGTGCGTTGGTGCTGCTATGTGGAGTGCAGGCAGTGCACGCAGCGTGAGGAGGTCTACACCTGCAAGGG
CGTCGAC

| | | | |
|---|---|---|---|
| NOV7c, 170251076 | | | |
| Protein Sequence | SEQ ID NO: 94 | 343 aa | MW at 38194.1kD |

GSSYPIWWLTGSEPLTILPLTLEPEAAAQAHYKACDRLKLERKQRRMCRRDPGVAETLVEAVSMSALECQFQF
RFERWNCTLEGRYRASLLKRGFKETAFLYAISSAGLTHALAKACSAGRMERCTCDEAPDLENREAWQWGGCGD
NLKYSSKFVKEFLGRRSSKDLRARVDFHNNLVGVKVIKAGVETTCKCHGVSGSCTVRTCWRQLAPFHEVGKHL
KHKYETALKVGSTTNEAAGEAGAISPPRGRASGAGGSDPLPRTPELVHLDDSPSFCLAGRFSPGTAGRRCHRE
KNCESICCGRGHNTQSRVVTRPCQCQVRWCCYVECRQCTQREEVYTCKGVD

| | | |
|---|---|---|
| NOV7d, CG53054-01 | SEQ ID NO: 95 | 1085 bp |
| DNA Sequence | ORF Start: ATG at 13 | ORF Stop: TGA at 1078 |

TAGTGAGCCGAGATGGCACTACTATATTCCAGCTTGGGTGTGGTTGTGTGCACCTGTAGTCCTAGTTACTTTG
GACTGACGGGCAGCGAGCCCCTGACCATCCTCCCGCTGACCCTGGAGCCAGAGGCGGCTGCCCAGGCGCACTA
CAAGGCCTGCGACCGGCTGAAGCTGGAGCGGAAGCAGCGGCGCATGTGCCGCCGGGACCCGGGCGTGGCAGAG
ACGCTGGTGGAGGCCGTGAGCATGAGTGCGCTCGAGTGCCAGTTCCAGTTCCGCTTTGAGCGCTGGAACTGCA
CGCTGGAGGGCCGCTACCGGGCCAGCCTGCTCAAGCGAGGTTTCAAGGAGACTGCCTTCCTCTATGCCATCTC
CTCGGCTGGCCTGACGCACGCACTGGCCAAGGCGTGCAGCGCGGGCCGCATGGAGCGCTGTACCTGCGATGAG
GCACCCGACCTGGAGAACCGTGAGGGCTGGAAGTGGGGTGGCTGTAGCGAGGACATCGAGTTTGGTGGGATGG
TGTCTCGGGAGTTCGCCGACGCCCGGGAGAACCGGCCAGATGCCCGCTCAGCCATGAACCGCCACAACAACGA
GGCTGGGCGCCAGGTGATCAAGGCTGGGGTGGAGACCACCTGCAAGTGCCACGGCGTGTCAGGCTCATGCACG
GTGCGGACCTGCTGGCGGCAGTTGGCGCCTTTCCATGAGGTGGGCAAGCATCTGAAGCACAAGTATGAGTCGG
CACTCAAGGTGGGCAGCACCACCAATGAAGCTGCCGGCGAGGCAGGTGCCATCTCCCCACCACGGGGCCGTGC
CTCGGGGGCAGGTGGCAGCGACCCGCTGCCCCGCACTCCAGAGCTGGTGCACCTGGATGACTCGCCTAGCTTC
TGCCTGGCTGGCCGCTTCTCCCCGGGCACCGCTGGCCGTAGGTGCCACCGTGAGAAGAACTGCGAGAGCATCT
GCTGTGGCCGCGGCCATAACACACAGAGCCGGGTGGTGACAAGGCCCTGCCAGTGCCAGGTGCGTTGGTGCTG
CTATGTGGAGTGCAGGCAGTGCACGCAGCGTGAGGAGGTCTACACCTGCAAGGGCTGAGTTCC

| | | | |
|---|---|---|---|
| NOV7d, CG53054-01 | | | |
| Protein Sequence | SEQ ID NO: 96 | 355 aa | MW at 39194.1kD |

MALLYSSLGVVVCTCSPSYFGLTGSEPLTILPLTLEPEAAAQAHYKACDRLKLERKQRRMCRRDPGVAETLVE
AVSMSALECQFQFRFERWNCTLEGRYRASLLKRGFKETAFLYAISSAGLTHALAKACSAGRMERCTCDEAPDL
ENREGWKWGGCSEDIEFGGMVSREFADARENRPDARSAMNRHNNEAGRQVIKAGVETTCKCHGVSGSCTVRTC
WRQLAPFHEVGKHLKHKYESALKVGSTTNEAAGEAGAISPPRGRASGAGGSDPLPRTPELVHLDDSPSFCLAG
RFSPGTAGRRCHREKNCESICCGRGHNTQSRVVTRPCQCQVRWCCYVECRQCTQREEVYTCKG

| | | |
|---|---|---|
| NOV7e, CG53054-03 | SEQ ID NO: 97 | 1029 bp |
| DNA Sequence | ORF Start: at 7 | ORF Stop: at 1024 |

GGATCCAGCTACCCGATCTGGTGGCTGACGGGCAGCGAGCCCCTGACCATCCTCCCGCTGACCCTGGAGCCAG
AGGCGGCCGCCCAGGCGCACTACAAGGCCTGCGACCGGCTGAAGCTGGAGCGGAAGCAGCGGCGCATGTGCCG
CCGGGACCCGGGCGTGGCAGAGACGCTGGTGGAGGCCGTGAGCATGAGTGCGCTCGAGTGCCAGTTCCAGTTC
CGCTTTGAGCGCTGGAACTGCACGCTGGAGGGCCGCTACCGGGCCAGCCTGCTCAAGCGAGGCTTCAAGGAGA
CTGCCTTCCTCTATGCCATCTCCTCGGCTGGCCTGACGCACGCACTGGCCAAGGCGTGCAGCGCGGGCCGCAT
GGAGCGCTGTACCTGCGATGAGGCACCCGACCTGGAGAACCGTGAGGCCTGGCAGTGGGGGGGCTGCGGAGAC
AACCTTAAGTACAGCAGCAAGTTCGTCAAGGAATTCCTGGGCAGACGGTCAAGCAAGGATCTGCGAGCCCGTG
TGGACTTCCACAACAACCTCGTGGGTGTGAAGGTGATCAAGGCTGGGGTGGAGACCACCTGCAAGTGCCACGG
CGTCTCAGGCTCATGCACGGTGCGGACCTGCTGGCGGCAGTTGGCGCCTTTCCATGAGGTGGGCAAGCATCTG
AAGCACAAGTATGAGACGGCACTCAAGGTGGGCAGCACCACCAATGAAGCTGCCGGCGAGGCAGGTGCCATCT
CCCCACCACGGGGCCGTGCCTCGGGGGCAGGTGGCAGCGACCCGCTGCCCCGCACTCCAGAGCTGGTGCACCT
GGATGACTCGCCTAGCTTCTGCCTGGCTGGCCGCTTCTCCCCGGGCACCGCTGGCCGTAGGTGCCACCGTGAG
AAGAACTGCGAGAGCATCTGCTGTGGCCGCGGCCATAACACACAGAGCCGGGTGGTCACAAGGCCCTGCCAGT
GCCAGGTGCGTTGGTGCTGCTATGTGGAGTGCAGGCAGTGCACGCAGCGTGAGGAGGTCTACACCTGCAAGGG
CGTCGAC

| | | | |
|---|---|---|---|
| NOV7e, CG53054-03 | | | |
| Protein Sequence | SEQ ID NO: 98 | 339 aa | MW at 37835.8kD |

SYPIWWLTGSEPLTILPLTLEPEAAAQAHYKACDRLKLERKQRRMCRRDPGVAETLVEAVSMSALECQFQFRF
ERWNCTLEGRYRASLLKRGFKETAFLYAISSAGLTHALAKACSAGRMERCTCDEAPDLENREAWQWGGCGDNL
KYSSKFVKEFLGRRSSKDLRARVDFHNNLVGVKVIKAGVETTCKCHGVSGSCTVRTCWRQLAPFHEVGKHLKH
KYETALKVGSTTNEAAGEAGAISPPRGRASGAGGSDPLPRTPELVHLDDSPSFCLAGRFSPGTAGRRCHREKN
CESICCGRGHNTQSRVVTRPCQCQVRWCCYVECRQCTQREEVYTCKG

| | | |
|---|---|---|
| NOV7f, CG53054-04 | SEQ ID NO: 99 | 1631 bp |
| DNA Sequence | ORF Start: ATG at 12 | ORF Stop: TGA at 1107 |

GGCGCGGCAAGATGCTGGATGGGTCCCCGCTGGCGCGCTGGCTGGCCGCGGCCTTCGGGCTGACGCTGCTGCT
CGCCGCGCTGCGCCCTTCGGCCGCCTACTTCGGGCTGACGGGCAGCGAGCCCCTGACCATCCTCCCGCTGACC
CTGGAGCCAGAGGCGGCCGCCCAGGCGCACTACAAGGCCTGCGACCGGCTGAAGCTGCAGCGGAAGCAGCGGC
GCATGTGCCGCCGGGACCCGGGCGTGGCAGAGACGCTGGTGGAGGCCGTGAGCATGAGTGCGCTCGAGTGCCA
GTTCCAGTTCCGCTTTGAGCGCTGGAACTGCACGCTGGAGGGCCGCTACCGGGCCAGCCTGCTCAAGCGAGGC
TTCAAGGAGACTGCCTTCCTCTATGCCATCTCCTCGGCTGGCCTGACGCACGCACTGGCCAAGGCGTGCAGCG
CGGGCCGCATGGAGCGCTGTACCTGCGATGAGGCACCCGACCTGGAGAACCGTGAGGCCTGGCAGTGGGGGGG
CTGCGGAGACAACCTTAAGTACAGCAGCAAGTTCGTCAAGGAATTCCTGGGCAGACGGTCAACCAAGGATCTG
CGAGCCCGTGTGGACTTCCACAACAACCTCGTGGGTGTGAAGGTGATCAAGGCTGGGGTGGAGACCACCTGCA
AGTGCCACGGCGTGTCAGGCTCATGCACGGTGCGGACCTGCTGGCGGCAGTTGGCGCCTTTCCATGAGGTGGG
CAAGCATCTGAAGCACAAGTATGAGACGGCACTCAAGGTGGGCAGCACCACCAATGAAGCTGCCGGCGAGGCA
GGTGCCATCTCCCCACCACGGGGCCGTGCCTCGGGGGCAGGTGGCAGCGACCCGCTGCCCCGCACTCCAGAGC
TGGTGCACCTGGATGACTCGCCTAGCTTCTGCCTGGCTGGCCGCTTCTCCCCGGGCACCGCTGGCCGTAGGTG
CCACCGTGAGAAGAACTGCGAGAGCATCTGCTGTGGCCGCGGCCATAACACACAGAGCCGGGTGGTGACAAGG
CCCTGCCAGTGCCAGGTGCGTTGGTGCTGCTATGTGGAGTGCAGGCAGTGCACGCAGCGTGAGGAGGTCTACA
CCTGCAAGGGCTGACTTCCCAGGCCCTGCCAGCCCTGCTGCACAGGCTGCAGGCATTGCACACGGTGTGAAGG
GTCTACACCTGCACAGGCTGAGTTCCTGGGCTCGACCAGCCCAGCTGCGTGGGGTACAGGCATTGCACACACT
GTGAATGGGTCTACACCTGCATGGGCTGAGTCCCTGGGCTCAGACCTAGCAGCGTGGGGTAGTCCCTGGGCTC
AGTCCTAGCTGCATGGGGTGCAGGCATTGCACAGAGCATGAATGGGCCTACACCTGCCAAGGCTGAATCCCTG
GGCCCAGCCAGCCCTGCTGCACATGGCACAGGCATTGCACACGGTGTGAGGAGTGTACACCTGCAAGGGCTGA
GGCCCTGGGCCCAGTCAGCCCTGCTGCTCAGAGTGCAGGCATTGCACATGGTGTGAGAAGGTCTACACCTGCA
AGGGACGAGTCCCCGGGCCTGGCCAACCCTGCTGTGCAGGGTGAGGGCCATGCATGCTAGTATGAGGGGTCTA
CACCTGCAAGGACTGAGAGGCTTTT

| | | | |
|---|---|---|---|
| NOV7f, CG53054-04 | | | |
| Protein Sequence | SEQ ID NO: 100 | 365 aa | MW at 40319.7kD |

MLDGSPLARWLAAAFGLTLLLAALRPSAAYFGLTGSEPLTILPLTLEPEAAAQAHYKACDRLKLERKQRRMCR
RDPGVAETLVEAVSMSALECQFQFRFERWNCTLEGRYRASLLKRGFKETAFLYAISSAGLTHALAKACSAGRM
ERCTCDEAPDLENREAWQWGGCGDNLKYSSKFVKEFLGRRSSKDLRARVDFHNNLVGVKVIKAGVETTCKCHG
VSGSCTVRTCWRQLAPFHEVGKHLKHKYETALKVGSTTNEAAGEAGAISPPRGRASGAGGSDPLPRTPELVHL
DDSPSFCLAGRFSPGTAGRRCHREKNCESICCGRGHNTQSRVVTRPCQCQVRWCCYVECRQCTQREEVYTCKG

[0393] A ClustalW comparison of the above protein sequences yields the following sequence alignment shown in Table 7B.

TABLE 7B
Comparison of the NOV7 protein sequences.

| | |
|---|---|
| NOV7a | --------MAPLGYFLLLCSLKQALGSYPIWWLTGSEPLTILPLTLEPEAAAQAHYKACD |
| NOV7b | ------------------------GSSYPIWWLTGSEPLTILPLTLEPEAGAQAHYKACD |
| NOV7c | ------------------------GSSYPIWWLTGSEPLTILPLTLEPEAAAQAHYKACD |
| NOV7d | -----------MALLYSSLGVVVCTCSPSYFGLTGSEPLTILPLTLEPEAAAQAHYKACD |
| NOV7e | --------------------------SYPIWWLTGSEPLTILPLTLEPEAAAQAHYKACD |
| NOV7f | MLDGSPLARWLAAAFGLTLLLAALRPSAAYFGLTGSEPLTILPLTLEPEAAAQAHYKACD |
| NOV7a | RLKLERKQRRMCRRDPGVAETLVEAVSMSALECQFQFRFERWNCTLEGRYRASLLKRGFK |
| NOV7b | RLKLERKQRRMCRRDPGVVETLVEAVSMSALECQFQFRFERWNCTLEGRYRASLLKRGFK |
| NOV7c | RLKLERKQRRMCRRDPGVAETLVEAVSMSALECQFQFRFERWNCTLEGRYRASLLKRGFK |
| NOV7d | RLKLERKQRRMCRRDPGVAETLVEAVSMSALECQFQFRFERWNCTLEGRYRASLLKRGFK |
| NOV7e | RLKLERKQRRMCRRDPGVAETLVEAVSMSALECQFQFRFERWNCTLEGRYRASLLKRGFK |
| NOV7f | RLKLERKQRRMCRRDPGVAETLVEAVSMSALECQFQFRFERWNCTLEGRYRASLLKRGFK |
| NOV7a | ETAFLYAISSAGLTHALAKACSAGRMERCTCDEAPDLENREAWQWGGCGDNLKYSSKFVK |
| NOV7b | ETAFLYAISSAGLTHALAKACSAGRMERCTCDEAPDLENREAWQWGGCGDNLKYSSKFVK |
| NOV7c | ETAFLYAISSAGLTHALAKACSAGRMERCTCDEAPDLENREAWQWGGCGDNLKYSSKFVK |
| NOV7d | ETAFLYAISSAGLTHALAKACSAGRMERCTCDEAPDLENREGWKWGGCSEDIEFGGMVSR |
| NOV7e | ETAFLYAISSAGLTHALAKACSAGRMERCTCDEAPDLENREAWQWGGCGDNLKYSSKFVK |
| NOV7f | ETAFLYAISSAGLTHALAKACSAGRMERCTCDEAPDLENREAWQWGGCGDNLKYSSKFVK |
| NOV7a | EFLGRRSSK-DLRARVDFHNNLVGVKVIKAGVETTCKCHGVSGSCTVRTCWRQLAPFHEV |
| NOV7b | EFLGRRSSK-DLRARVDFHNNLVGVKVIKAGVETTCKCHGVSGSCTVRTCWRQLAPFHEV |
| NOV7c | EFLGRRSSK-DLRARVDFHNNLVGVKVIKAGVETTCKCHGVSGSCTVRTCWRQLAPFHEV |
| NOV7d | EFADARENRPDARSAMNRHNNEAGRQVIKAGVETTCKCHGVSGSCTVRTCWRQLAPFHEV |
| NOV7e | EFLGRRSSK-DLRARVDFHNNLVGVKVTKAGVETTCKCHGVSGSCTVRTCWRQLAPFHEV |
| NOV7f | EFLGRRSSK-DLRARVDFHNNLVGVKVIKAGVETTCKCHGVSGSCTVRTCWRQLAPFHEV |
| NOV7a | GKHLKHKYETALKVGSTTNEAAGEAGAISPPRGRASGAGGSDPLPRTPELVHLDDSPSFC |
| NOV7b | GKHLKHKYETALKVGSTTNEAAGEAGAISPPRGRASGAGGSDPLPRTPELVHLDDSPSFC |
| NOV7c | GKHLKHKYETALKVGSTTNEAAGEAGAISPPRGRASGAGGSDPLPRTPELVHLDDSPSFC |
| NOV7d | GKHLKHKYESALKVGSTTNEAAGEAGAISPPRGRASGAGGSDPLPRTPELVHLDDSPSFC |
| NOV7e | GKHLKHKYETALKVGSTTNEAAGEAGAISPPRGRASGAGGSDPLPRTPELVHLDDSPSFC |
| NOV7f | GKHLKHKYETALKVGSTTNEAAGEAGAISPPRGRASGAGGSDPLPRTPELVHLDDSPSFC |
| NOV7a | LAGRFSPGTAGRRCHREKNCESICCGRGHNTQSRVVTRPCQCQVRWCCYVECRQCTQREE |
| NOV7b | LAGRFSPGTAGRRCHREKNCESICCGRGHNTQSRVVTRPCQCQVRWCCYVECRQCTQREE |
| NOV7c | LAGRFSPGTAGRRCHREKNCESICCGRGHNTQSRVVTRPCQCQVRWCCYVECRQCTQREE |
| NOV7d | LAGRFSPGTAGRRCHREKNCESICCGRGHNTQSRVVTRPCQCQVRWCCYVECRQCTQREE |
| NOV7e | LAGRFSPGTAGRRCHREKNCESICCGRGHNTQSRVVTRPCQCQVRWCCYVECRQCTQREE |
| NOV7f | LAGRFSPGTAGRRCHREKNCESICCGRGHNTQSRVVTRPCQCQVRWCCYVECRQCTQREE |
| NOV7a | VYTCKG-- |
| NOV7b | VYTCKGVD |
| NOV7c | VYTCKGVD |
| NOV7d | VYTCKG-- |
| NOV7e | VYTCKG-- |
| NOV7f | VYTCKG-- |
| NOV7a | (SEQ ID NO: 90) |
| NOV7b | (SEQ ID NO: 92) |
| NOV7c | (SEQ ID NO: 94) |
| NOV7d | (SEQ ID NO: 96) |
| NOV7e | (SEQ ID NO: 98) |
| NOV7f | (SEQ ID NO: 100) |

[0394] Further analysis of the NOV7a protein yielded the following properties shown in Table 7C.

TABLE 7C
Protein Sequence Properties NOV7a

| SignalP | Cleavage site between residues 19 and 20 | | | |
|---|---|---|---|---|
| analysis: | | | | |
| PSORT II | PSG: a new signal peptide prediction method | | | |
| analysis: | N-region: length 0; pos. chg 0; neg. chg 0 | | | |
| | H-region: length 13; peak value 9.00 | | | |
| | PSG score: 4.60 | | | |
| | GvH: von Heijne's method for signal seq. recognition | | | |
| | GvH score (threshold: −2.1): 0.73 | | | |
| | possible cleavage site: between 18 and 19 | | | |
| | >>> Seems to have a cleavable signal peptide (1 to 18) | | | |
| | ALOM: Klein et al's method for TM region allocation | | | |
| | Init position for calculation: 19 | | | |
| | Tentative number of TMS(s) for the threshold 0.5: 0 | | | |
| | number of TMS(s) . . . fixed | | | |
| | PERIPHERAL | Likelihood = 3.76 (at 114) | | |
| | ALOM score: 3.76 (number of TMSs: 0) | | | |
| | MTOP: Prediction of membrane topology (Hartmann et al.) | | | |
| | Center position for calculation: 9 | | | |
| | Charge difference: 0.0 C(1.0)-N(1.0) | | | |
| | N >= C: N-terminal side will be inside | | | |
| | MITDISC: discrimination of mitochondrial targeting seq | | | |
| | R content: | 0 | Hyd Moment(75): | 1.56 |
| | Hyd Moment(95): | 3.50 | G content: | 3 |
| | D/E content: | 1 | S/T content: | 4 |

Score: −6.15
Gavel: prediction of cleavage sites for mitochondrial preseq
cleavage site motif not found
NUCDISC: discrimination of nuclear localization signals
pat4: none
pat7: none
bipartite: none
content of basic residues: 14.8%
NLS Score: −0.47
KDEL: ER retention motif in the C-terminus: none
ER Membrane Retention Signals:
KKXX-like motif in the C-terminus: YTCK
SKL: peroxisomal targeting signal in the C-terminus: none
PTS2: 2nd peroxisomal targeting signal: none
VAC: possible vacuolar targeting motif: none
RNA-binding motif: none
Actinin-type actin-binding motif:
type 1: none
type 2: none
NMYR: N-myristoylation pattern: none
Prenylation motif: none
memYQRL: transport motif from cell surface to Golgi: none
Tyrosines in the tail: none
Dileucine motif in the tail: none
checking 63 PROSITE DNA binding motifs: none
checking 71 PROSITE ribosomal protein motifs: none
checking 33 PROSITE prokaryotic DNA binding motifs: none
NNCN: Reinhardt's method for Cytoplasmic/Nuclear discrimination
Prediction: nuclear
Reliability: 70.6
COIL: Lupas's algorithm to detect coiled-coil regions
total: 0 residues
Final Results (k = 9/23):
55.6%: extracellular, including cell wall
22.2%: mitochondrial
11.1%: vacuolar
11.1%: nuclear
>> prediction for CG53054-02 is exc (k = 9)

[0395] A search of the NOV7a protein against the Geneseq database, a proprietary database that contains sequences published in patents and patent publication, yielded several homologous proteins shown in Table 7D.

TABLE 7D
Geneseq Results for NOV7a

| | | NOV7a | Identities/ | |
|---|---|---|---|---|
| | | Residues/ | Similarities for | |
| Geneseq | Protein/Organism/Length [Patent #, | Match | the Matched | Expect |
| Identifier | Date] | Residues | Region | Value |
| AAE34048 | WNT-14 protein - Unidentified, 365 | 2 . . . 357 | 339/356 (95%) | 0.0 |
| | aa. [WO200290992-A2, | 13 . . . 365 | 343/356 (96%) | |
| | 14 NOV. 2002] | | | |
| ABU55894 | Human WNT-14 protein - Homo | 2 . . . 357 | 339/356 (95%) | 0.0 |
| | sapiens, 365 aa. [WO200277204-A2, | 13 . . . 365 | 343/356 (96%) | |
| | 03 OCT. 2002] | | | |
| ABG69638 | Human secreted protein SCEP-18 - | 2 . . . 357 | 311/357 (87%) | 0.0 |
| | Homo sapiens, 366 aa. | 13 . . . 366 | 327/357 (91%) | |
| | [WO200248337-A2, 20 JUN. 2002] | | | |
| AAO18744 | Human NOV8 protein - Homo sapiens, | 25 . . . 357 | 302/334 (90%) | 0.0 |
| | 355 aa. [WO200257450-A2, | 22 . . . 355 | 316/334 (94%) | |
| | 25 JUL. 2002] | | | |
| AAE17305 | Human WNT15 protein, | 22 . . . 356 | 210/338 (62%) | e−124 |
| | sbg389686WNT15a #1 -Homo | 14 . . . 346 | 257/338 (75%) | |
| | sapiens, 704 aa. [WO200198342-A1, | | | |
| | 27 DEC. 2001] | | | |

[0396] In a BLAST search of public sequence databases, the NOV7a protein was found to have homology to the proteins shown in the BLASTP data in Table 7E.

TABLE 7E
Public BLASTP Results for NOV7a

| | | NOV7a | Identities/ | |
|---|---|---|---|---|
| Protein | | Residues/ | Similarities for | |
| Accession | | Match | the Matched | Expect |
| Number | Protein/Organism/Length | Residues | Portion | Value |
| O14904 | Wnt-9a protein precursor (Wnt-14) - | 2 . . . 357 | 339/356 (95%) | 0.0 |
| | Homo sapiens (Human), 365 aa. | 13 . . . 365 | 343/356 (96%) | |
| Q8R5M2 | Wnt-9a protein precursor (Wnt-14) - | 2 . . . 357 | 333/356 (93%) | 0.0 |
| | Mus musculus (Mouse), 365 aa. | 13 . . . 365 | 340/356 (94%) | |
| O42280 | Wnt-9a protein precursor (Wnt-14) - | 25 . . . 356 | 283/333 (84%) | e−173 |
| | Gallus gallus (Chicken), 354 aa. | 24 . . . 353 | 310/333 (92%) | |
| Q8C718 | WNT14B - Mus musculus (Mouse), | 8 . . . 356 | 216/354 (61%) | e−125 |
| | 359 aa. | 12 . . . 358 | 264/354 (74%) | |
| O35468 | Wnt-9b protein precursor (Wnt-15) | 8 . . . 356 | 216/354 (61%) | e−125 |
| | (Wnt-14b) - Mus musculus (Mouse), | 12 . . . 358 | 264/354 (74%) | |
| | 359 aa. | | | |

[0397] PFam analysis predicts that the NOV7a protein contains the domains shown in the Table 7F.

TABLE 7F
Domain Analysis of NOV7a

| | | Identities/ | |
|---|---|---|---|
| Pfam | | Similarities | Expect |
| Domain | NOV7a Match Region | for the Matched Region | Value |
| wnt | 50 . . . 356 | 129/359 (36%) | 4.6e−103 |
| | | 234/359 (65%) | |

### Example 8

[0398] The NOV8 clone was analyzed, and the nucleotide and encoded polypeptide sequences are shown in Table 8A.

TABLE 8A
NOV8 Sequence Analysis

| | | |
|---|---|---|
| NOV8a, CG53473-02 | SEQ ID NO: 101 | 514 bp |
| DNA Sequence | ORF Start: ATG at 37 | ORF Stop: TGA at 400 |

CGCGCGCCCGAACGAAGCCGCGGCCCGGGCACAGCCATGGCCCGGCGGGCGGGGGGCGCTCGGATGTTCGGCA
GCCTCCTGCTCTTCGCCCTGCTCGCTGCCGGCGTCGCCCCGCTCAGCTGGGATCTCCCGGAGCCCCGCAGCCG
AGCCAGCAAGATCCGAGTGCACTCGCGAGGCAACCTCTGGGCCACCGGTCACTTCATGGGCAAGAAGAGTCTG
GAGCCTTCCAGCCCATCCCCATTGGGGACAGCTCCCCACACCTCCCTGAGGGACCAGCGACTGCAGCTGAGTC
ATGATCTGCTCGGAATCCTCCTGCTAAAGAAGGCTCTGGGCGTGAGCCTCAGCCGCCCCGCACCCCAAATCCA
GTACAGGAGGCTGCTGGTACAAATACTGCAGAAATGACACCAATAATGGGGCAGACACAACAGCCTGCCTTAG
ATTGTGCCCACCCAGGGAAGGTGCTGAATGGGACCCTGTTGATGGCCATCAACAGGGTCCCATTCAGCACAGG
CTG

| | | | |
|---|---|---|---|
| NOV8a, CG53473-02 | | | |
| Protein Sequence | SEQ ID NO: 102 | 121 aa | MW at 13251.4kD |

MARRAGGARMFGSLLLFALLAAGVAPLSWDLPEPRSRASKIRVHSRGNLWATGHFMGKKSLEPSSPSPLGTAP
HTSLRDQRLQLSHDLLGILLLKKALGVSLSRPAPQIQYRRLLVQILQK

| | | |
|---|---|---|
| NOV8b, CG53473-01 | SEQ ID NO: 103 | 646 bp |
| DNA Sequence | ORF Start: ATG at 62 | ORF Stop: TGA at 398 |

AGCGCGCCCGAACGAAGCCGCGGCCCGGGCACAGCATGGCCCGCGGCGGGAGGGCGCTCGGATGTTCGGCAGC
CTCCTGCACTTCGCCCTGCTCGCTGCCGGCGTCGTCCCGCTCAGCTGGGATCTCCCGGAGCCCCGCAGCCGAG
CCAGCAAGATCCGAGTGCACTCGCGAGGCAAGCTCTGGGCCATCGGTCACTTCATGGGCAAGAAGAGTCTGGA
GCCTTCCAGCCCATCCCCATTGGGGACAGCTCCCCACACCTCCCTGAGGGACCAGCGACTGCAGCTGAGTCAT
GATCTGCTCGGAATCCTCCTGCTAAAGAAGGCTCTGGGCGTGAGCCTCAGCCGCCCCGCACCCCAAATCCAGT
ACAGGAGGCTGCTGGTACAAATACTGCAGAAATGACACCAATAATGGGGCAGACACAACAGCGTGGCTTAGAT
TGTGCCCACCCAGGGAAGGTGCTGAATGGGACCCTGTTGATGGCCCCATCTGGATGTAAATCCTGAGCTCAAA
TCTCTGTTACTCCATTACTGTGATTTCTGGCTGGGTCACCAGAAATATCGCTGATGCAGACACAGATTATGTT
CCTGCTGTATTTCCTGCTTCCCTGTTGAATTGGTGAATAAAACCTTGCTCTATACATACAAA

| | | | |
|---|---|---|---|
| NOV8b, CG53473-01 | | | |
| Protein Sequence | SEQ ID NO: 104 | 112 aa | MW at 12402.5kD |

MFGSLLHFALLAAGVVPLSWDLPEPRSRASKIRVHSRGKLWAIGHFMGKKSLEPSSPSPLGTAPHTSLRDQRL
QLSHDLLGILLLKKALGVSLSRPAPQIQYRRLLVQILQK

| | | |
|---|---|---|
| NOV8c, CG53473-03 | SEQ ID NO: 105 | 30 bp |
| DNA Sequence | ORF Start: at 1 | ORF Stop: end of sequence |

GGCAAGCTCTGGGCCATCGGTCACTTCATG

| | | | |
|---|---|---|---|
| NOV8c, CG53473-03 | | | |
| Protein Sequence | SEQ ID NO: 106 | 10 aa | MW at 1159.4kD |

GKLWAIGHFM

| | | |
|---|---|---|
| | SEQ ID NO: 107 | 514 bp |
| NOV8d, SNP13376396 of | ORF Start: ATG at 37 | ORF Stop: TGA at 400 |
| CG53473-02, DNA Sequence | SNP Pos: 190 | SNP Change: A to G |

CGCGCGCCCGAACGAAGCCGCGGCCCGGGCACAGCCATGGCCCGGCGGGCGGGGGGCGCTCGGATGTTCGGCA
GCCTCCTGCTCTTCGCCCTGCTCGCTGCCGGCGTCGCCCCGCTCAGCTGGGATCTCCCGGAGCCCCGCAGCCG
AGCCAGCAAGATCCGAGTGCACTCGCGAGGCAACCTCTGGGCCGCCGGTCACTTCATGGGCAAGAAGAGTCTG
GAGCCTTCCAGCCCATCCCCATTGGGGACAGCTCCCCACACCTCCCTGAGGGACCAGCGACTGCAGCTGAGTC
ATGATCTGCTCGGAATCCTCCTGCTAAAGAAGGCTCTGGGCGTGAGCCTCAGCCGCCCCGCACCCCAAATCCA
GTACAGGAGGCTGCTGGTACAAATACTGCAGAAATGACACCAATAATGGGGCAGACACAACAGCGTGGCTTAG
ATTGTGCCCACCCAGGGAAGGTGCTGAATGGGACCCTGTTGATGGCCATCAACAGGGTCCCATTCAGCACAGG
CTG

| | | | |
|---|---|---|---|
| NOV8d, SNP13376396 of | SEQ ID NO: 108 | | MW at 13221.4kD |
| CG53473-02, Protein Sequence | SNP Pos: 52 | 121 aa | SNP Change: Thr to Ala |

MARRAGGARMFGSLLLFALLAAGVAPLSWDLPEPRSRASKIRVHSRGNLWAAGHFMGKKSLEPSSPSPLGTAP
HTSLRDQRLQLSHDLLGILLLKKALGVSLSRPAPQIQYRRLLVQILQK

| | | |
|---|---|---|
| | SEQ ID NO: 109 | 514 bp |
| NOV8e, SNP13376395 of | ORF Start: ATG at 37 | ORF Stop: TGA at 400 |
| CG53473-02, DNA Sequence | SNP Pos: 253 | SNP Change: C to A |

CGCGCGCCCGAACGAAGCCGCGGCCCGGGCACAGCCATGGCCCGGCGGGCGGGGGGCGCTCGGATGTTCGGCA
GCCTCCTGCTCTTCGCCCTGCTCGCTGCCGGCGTCGCCCCGCTCAGCTGGGATCTCCCGGAGCCCCGCAGCCG
AGCCAGCAAGATCCGAGTGCACTCGCGAGGCAACCTCTGGGCCACCGGTCACTTCATGGGCAAGAAGAGTCTG
GAGCCTTCCAGCCCATCCCCATTGGGGACAGCTACCCACACCTCCCTGAGGGACCAGCGACTGCAGCTGAGTC
ATGATCTGCTCGGAATCCTCCTGCTAAAGAAGGCTCTGGGCGTGAGCCTCAGCCGCCCCGCACCCCAAATCCA
GTACAGGAGGCTGCTGGTACAAATACTGCAGAAATGACACCAATAATGGGGCAGACACAACAGCGTGGCTTAG
ATTGTGCCCACCCAGGGAAGGTGCTGAATGGGACCCTGTTGATGGCCATCAACAGGGTCCCATTCAGCACAGG
CTG

| | | | |
|---|---|---|---|
| NOV8e, SNP13376395 of | SEQ ID NO: 110 | | MW at 13255.4kD |
| CG53473-02, Protein Sequence | SNP Pos: 73 | 121 aa | SNP Change: Pro to Thr |

[sequence omitted]

| | | |
|---|---|---|
| | SEQ ID NO: 111 | 514 bp |
| NOV8f, SNP13376394 of | ORF Start: ATG at 37 | ORF Stop: TAA at 400 |
| CG53473-02, DNA Sequence | SNP Pos: 401 | SNP Change: G to A |

CGCGCGCCCGAACGAAGCCGCGGCCCGGGCACAGCCATGGCCCGGCGGGCGGGGGGCGCTCGGATGTTCGGCA
GCCTCCTGCTCTTCGCCCTGCTCGCTGCCGGCGTCGCCCCGCTCAGCTGGGATCTCCCGGAGCCCCGCAGCCG
AGCCAGCAAGATCCGAGTGCACTCGCGAGGCAACCTCTGGGCCACCGGTCACTTCATGGGCAAGAAGAGTCTG
GAGCCTTCCAGCCCATCCCCATTGGGGACAGCTCCCCACACCTCCCTGAGGGACCAGCGACTGCAGCTGAGTC
ATGATCTGCTCGGAATCCTCCTGCTAAAGAAGGCTCTGGGCGTGAGCCTCAGCCGCCCCGCACCCCAAATCCA
GTACAGGAGGCTGCTGGTACAAATACTGCAGAAATAACACCAATAATGGGGCAGACACAACAGCGTGGCTTAG
ATTGTGCCCACCCAGGGAAGGTGCTGAATGGGACCCTGTTGATCGCCATCAACAGGGTCCCATTCAGCACAGG
CTG

| | | | |
|---|---|---|---|
| NOV8f, SNP13376394 of | | | MW at 13251.4kD |
| CG53473-02, Protein Sequence | SEQ ID NO: 112 | 112 aa | SNP change: no change |

MARRAGGARMFGSLLLFALLAAGVAPLSWDLPEPRSRASKIRVHSRGNLWATGHFMGKKSLEPSSPSPLGTAP
HTSLRDQRLQLSHDLLGILLLKKALGVSLSRPAPQIQYRRLLVQILQK

[0399] A ClustalW comparison of the above protein sequences yields the following sequence alignment shown in Table 8B.

TABLE 8B
Comparison of the NOV8 protein sequences.

| | |
|---|---|
| NOV8a | MARRAGGARMFGSLLLFALLAAGVAPLSWDLPEPRSRASKIRVHSRGNLWATGHFMGKKS |
| NOV8b | ---------MFGSLLHFALLAAGVVPLSWDLPEPRSRASKIRVHSRGKLWAIGHFMGKKS |
| NOV8c | ----------------------------------------------GKLWAIGHFM---- |
| NOV8a | LEPSSPSPLGTAPHTSLRDQRLQLSHDLLGILLLKKALGVSLSRPAPQIQYRRLLVQILQ |
| NOV8b | LEPSSPSPLGTAPHTSLRDQRLQLSHDLLGILLLKKALGVSLSRPAPQIQYRRLLVQILQ |
| NOV8c | ------------------------------------------------------------ |
| NOV8a | K |
| NOV8b | K |
| NOV8c | - |
| NOV8a | (SEQ ID NO: 102) |
| NOV8b | (SEQ ID NO: 104) |
| NOV8c | (SEQ ID NO: 106) |

[0400] Further analysis of the NOV8a protein yielded the following properties shown in Table 8C.

TABLE 8C
Protein Sequence Properties NOV8a

| SignalP | | | | |
|---|---|---|---|---|
| analysis: | Cleavage site between residues 27 and 28 | | | |
| PSORT II | PSG: a new signal peptide prediction method | | | |
| analysis: | N-region: length 9; pos. chg 3; neg. chg 0 | | | |
| | H-region: length 20; peak value 10.93 | | | |
| | PSG score: 6.53 | | | |
| | GvH: von Heijne's method for signal seq. recognition | | | |
| | GvH score (threshold: −2.1): 2.23 | | | |
| | possible cleavage site: between 26 and 27 | | | |
| | >>> Seems to have a cleavable signal peptide (1 to 26) | | | |
| | ALOM: Klein et al's method for TM region allocation | | | |
| | Init position for calculation: 27 | | | |
| | Tentative number of TMS(s) for the threshold 0.5: 0 | | | |
| | number of TMS(s) . . . fixed | | | |
| | PERIPHERAL | Likelihood = 1.85 (at 87) | | |
| | ALOM score: 1.85 (number of TMSs: 0) | | | |
| | MTOP: Prediction of membrane topology (Hartmann et al.) | | | |
| | Center position for calculation: 13 | | | |
| | Charge difference: −1.5 C(2.5)-N(4.0) | | | |
| | N >= C: N-terminal side will be inside | | | |
| | MITDISC: discrimination of mitochondrial targeting seq | | | |
| | R content: | 3 | Hyd Moment(75): | 12.45 |
| | Hyd Moment(95): | 10.60 | G content: | 4 |
| | D/E content: | 1 | S/T content: | 2 |

Score: −2.16
Gavel: prediction of cleavage sites for mitochondrial preseq
R-2 motif at 19 ARM|FG
NUCDISC: discrimination of nuclear localization signals
pat4: none
pat7: none
bipartite: none
content of basic residues: 14.9%
NLS Score: −0.47
KDEL: ER retention motif in the C-terminus: none
ER Membrane Retention Signals:
XXRR-like motif in the N-terminus: ARRA
none
SKL: peroxisomal targeting signal in the C-terminus: none
PTS2: 2nd peroxisomal targeting signal: none
VAC: possible vacuolar targeting motif: none
RNA-binding motif: none
Actinin-type actin-binding motif:
type 1: none
type 2: none
NMYR: N-myristoylation pattern: none
Prenylation motif: none
memYQRL: transport motif from cell surface to Golgi: none
Tyrosines in the tail: none
Dileucine motif in the tail: none
checking 63 PROSITE DNA binding motifs: none
checking 71 PROSITE ribosomal protein motifs: none
checking 33 PROSITE prokaryotic DNA binding motifs: none
NNCN: Reinhardt's method for Cytoplasmic/Nuclear discrimination
Prediction: nuclear
Reliability: 89
COIL: Lupas's algorithm to detect coiled-coil regions
total: 0 residues
Final Results (k = 9/23):
44.4%: extracellular, including cell wall
33.3%: mitochondrial
22.2%: nuclear
>> prediction for CG53473-02 is exc (k = 9)

[0401] A search of the NOV8a protein against the Geneseq database, a proprietary database that contains sequences published in patents and patent publication, yielded several homologous proteins shown in Table 8D.

TABLE 8D
Geneseq Results for NOV8a

| | | NOV8a | Identities/ | |
|---|---|---|---|---|
| | | Residues/ | Similarities for | |
| Geneseq | Protein/Organism/Length [Patent #, | Match | the Matched | Expect |
| Identifier | Date] | Residues | Region | Value |
| AAE17605 | Human extracellular messenger | 1 . . . 121 | 121/121 (100%) | 1e−63 |
| | (XMES)-7 protein - Homo sapiens, | 1 . . . 121 | 121/121 (100%) | |
| | 121 aa. [WO200194587-A2, | | | |
| | 13 DEC 2001] | | | |
| ABP51992 | NOVNEUR homologous amino acid | 1 . . . 121 | 114/121 (94%) | 3e−58 |
| | sequence SEQ ID NO: 29 - Homo | 1 . . . 121 | 114/121 (94%) | |
| | sapiens, 121 aa. [US2002068279-A1, | | | |
| | 06 JUN. 2002] | | | |
| ABP51987 | NOVNEUR homologous amino acid | 4 . . . 121 | 112/118 (94%) | 7e−58 |
| | sequence SEQ ID NO: 24 - Homo | 1 . . . 118 | 112/118 (94%) | |
| | sapiens, 118 aa. [US2002068279-A1, | | | |
| | 06 JUN. 2002] | | | |
| ABP51989 | NOVNEUR homologous amino acid | 4 . . . 121 | 111/118 (94%) | 1e−56 |
| | sequence SEQ ID NO: 26 - Homo | 1 . . . 118 | 111/118 (94%) | |
| | sapiens, 118 aa. [US2002068279-A1, | | | |
| | 06 JUN. 2002] | | | |
| ABP51990 | NOVNEUR homologous amino acid | 10 . . . 121 | 108/112 (96%) | 7e−56 |
| | sequence SEQ ID NO: 27 - Homo | 1 . . . 112 | 108/112 (96%) | |
| | sapiens, 112 aa. [US2002068279-A1, | | | |
| | 06 JUN. 2002] | | | |

[0402] In a BLAST search of public sequence databases, the NOV8a protein was found to have homology to the proteins shown in the BLASTP data in Table 8E.

TABLE 8E
Public BLASTP Results for NOV8a

| | | NOV8a | Identities/ | |
|---|---|---|---|---|
| Protein | | Residues/ | Similarities for | |
| Accession | | Match | the Matched | Expect |
| Number | Protein/Organism/Length | Residues | Portion | Value |
| P08949 | Neuromedin B-32 precursor | 1 . . . 121 | 120/121 (99%) | 2e−62 |
| | [Contains: Neuromedin B] - Homo | 1 . . . 121 | 120/121 (99%) | |
| | sapiens (Human), 121 aa. | | | |
| Q9CR53 | Neuromedin B-32 precursor | 1 . . . 121 | 89/121 (73%) | 2e−43 |
| | [Contains: Neuromedin B] - Mus | 1 . . . 121 | 99/121 (81%) | |
| | musculus (Mouse), 121 aa. | | | |
| A37178 | neuromedin B precursor - rat, 117 aa. | 1 . . . 115 | 84/115 (73%) | 2e−41 |
| | | 1 . . . 115 | 94/115 (81%) | |
| A28945 | neuromedin B precursor - human, 76 | 1 . . . 73 | 69/73 (94%) | 5e−33 |
| | aa. | 1 . . . 73 | 69/73 (94%) | |
| P01297 | Neuromedin B-32 [Contains: | 25 . . . 56 | 30/32 (93%) | 2e−11 |
| | Neuromedin B] - Sus scrofa (Pig), 32 | 1 . . . 32 | 30/32 (93%) | |
| | aa. | | | |

[0403] PFam analysis predicts that the NOV8a protein contains the domains shown in the Table 8F.

TABLE 8F
Domain Analysis of NOV8a

| | | Identities/ | |
|---|---|---|---|
| | NOV8a Match | Similarities | Expect |
| Pfam Domain | Region | for the Matched Region | Value |
| Bombesin | 47 . . . 56 | 8/10 (80%) | 0.26 |
| | | 10/10 (100%) | |

### Example 9

[0404] The NOV9 clone was analyzed, and the nucleotide and encoded polypeptide sequences are shown in Table 9A.

TABLE 9A
NOV9 Sequence Analysis

| | | |
|---|---|---|
| NOV9a, CG55184-03 | SEQ ID NO: 113 | 614 bp |
| DNA Sequence | ORF Start: ATG at 4 | ORF Stop: TAG at 607 |

ACCATGGGCTCCGGGCGCCGGGCGCTGTCCGCGGTGCCGGCCGTGCTGCTGGTCCTCACGCTGCCGGGGCTGC
CCGTCTGGGCACAGAACGACACGGAGCCCATCGTGCTGGAGGGCAAGTGTCTGGTGGTGTGCGACTCGAACCC
GGCCACGGACTCCAAGGGCTCCTCTTCCTCCCCGCTGGGGATATCGGTCCGGGCGGCCAACTCCAAGGTCGCC
TTCTCGGCGGTGCGGAGCACCAACCACGAGCCATCCGAGATGAGCAACAAGACGCGCATCATTTACTTCGATC
AGATCCTGGTGAATGTGGGTAATTTTTTCACATTGGAGTCTGTCTTTGTAGCACCAAGAAAAGGAATTTACAG
TTTCAGTTTTCACGTGATTAAAGTCTACCAGAGCCAAACTATCCAGGTTAACTTGATGTTAAATGGAAAACCA
GTAATATCTGCCTTTGCGGGGGACAAAGATGTTACTCGTGAAGCTGCCACGAATGGTGTCCTGCTCTACCTAG
ATAAAGAGGATAAGGTTTACCTAAAACTGGAGAAAGGTAATTTGGTTGGAGGCTGGCAGTATTCCACGTTTTC
TGGCTTTCTGGTGTTCCCCCTATAGGATTC

| | | | |
|---|---|---|---|
| NOV9a, CG55184-03 | | | |
| Protein Sequence | SEQ ID NO: 114 | 201 aa | MW at 21807.9kD |

MGSGRRALSAVPAVLLVLTLPGLPVWAQNDTEPIVLEGKCLVVCDSNPATDSKGSSSSPLGISVRAANSKVAF
SAVRSTNHEPSEMSNKTRIIYFDQILVNVGNFFTLESVFVAPRKGIYSFSFHVIKVYQSQTIQVNLMLNGKPV
ISAFAGDKDVTREAATNGVLLYLDKEDKVYLKLEKGNLVGGWQYSTFSGFLVFPL

| | | |
|---|---|---|
| NOV9b, CG55184-01 | SEQ ID NO: 115 | 614 bp |
| DNA Sequence | ORF Start: ATG at 4 | ORF Stop: TAG at 607 |

ACCATGGGCTCCGGGCGCCGGGCGCTGTCCGCGGTGCCGGCCGTGCTGCTGGTCCTCACGCTGCCGGGGCTGC
CCGTCTGGGCACAGAACGACACGGAGCCCATCGTGCTGGAGGGCAAGTGTCTGGTGGTGTGCGACTCGAACCC
GGCCACGGACTCCAAGGGCTCCTCTTCCTCCCCGCTGGGGATATCGGTCCGGGCGGCCAACTCCAAGGTCGCC
TTCTCGGCGGTGCGGAGCACCAACCACGAGCCATCCGAGATGAGCAACAAGACGCGCATCATTTACTTCGATC
AGATCCTGGTGAATGTGGGTAATTTTTTCACATTGGAGTCTGTCTTTGTAGCACCAAGAAAAGGAATTTACAG
TTTCAGTTTTCACGTGATTAAAGTCTACCAGAGCCAAACTATCCAGGTTAACTTGATGTTAAATGGAAAACCA
GTAATATCTGCCTTTGCGGGGGACAAAGATGTTACTCGTGAAGCTGCCACGAATGGTGTCCTGCTCTACCTAG
ATAAAGAGGATAAGGTTTACCTAAAACTGGAGAAAGGTAATTTGGTTGGAGGCTGGCAGTATTCCACGTTTTC
TGGCTTTCTGGTGTTCCCCCTATAGGATTC

| | | | |
|---|---|---|---|
| NOV9b, CG55184-01 | | | |
| Protein Sequence | SEQ ID NO: 116 | 201 aa | MW at 21807.9kD |

MGSGRRALSAVPAVLLVLTLPGLPVWAQNDTEPIVLEGKCLVVCDSNPATDSKGSSSSPLGISVRAANSKVAF
SAVRSTNHEPSEMSNKTRIIYFDQILVNVGNFFTLESVFVAPRKGIYSFSFHVIKVYQSQTIQVNLMLNGKPV
ISAFAGDKDVTREAATNGVLLYLDKEDKVYLKLEKGNLVGGWQYSTFSGFLVFPL

| | | |
|---|---|---|
| NOV9c, CG55184-02 | SEQ ID NO: 117 | 522 bp |
| DNA Sequence | ORF Start: at 1 | ORF Stop: end of sequence |

CAGAACGACACGGAGCCCATTGTGCTGGAGGGCAAGTGTCTGGTGGTGTGCGACTCGAACCCGGCCACGGACT
CCAAGGGCTCCTCTTCCTCCCCGCTGGGGATATCGGTCCGGGCGGCCAACTCCAAGGTCGCCTTCTCGGCGGT
GCGGAGCACCAACCACGAGCCATCCGAGATGAGCAACAAGACGCGCATCATTTACTTCGATCAGATCCTGGTG
AATGTGGGTAATTTTTTCACATTGGAGTCTGTCTTTGTAGCACCAAGAAAAGGAATTTACAGTTTCAGTTTTC
ACGTGATTAAAGTCTACCAGAGCCAAACTATCCAGGTTAACTTGATGTTAAATGGAAAACCAGTAATATCTGC
CTTTGCGGGGGACAAAGATGTTACTCGTGAAGCTGCCACGAATGGTGTCCTGCTCTACCTAGATAAAGAGGAT
AAGGTTTACCTAAAACTGGAGAAAGGTAATTTGGTTGGAGGCTGGCAGTATTCCACGTTTTCTGGCTTTCTGG
TGTTCCCCCTA

| | | | |
|---|---|---|---|
| NOV9c, CG55184-02 | | | |
| Protein Sequence | SEQ ID NO: 118 | 174 aa | MW at 19080.6kD |

QNDTEPIVLEGKCLVVCDSNPATDSKGSSSSPLGISVRAANSKVAFSAVRSTNHEPSEMSNKTRIIYFDQILV
NVGNFFTLESVFVAPRKGIYSFSFHVIKVYQSQTIQVNLMLNGKPVISAFAGDKDVTREAATNGVLLYLDKED
KVYLKLEKGNLVGGWQYSTFSGFLVFPL

| | | |
|---|---|---|
| NOV9d, CG55184-04 | SEQ ID NO: 119 | 148 bp |
| DNA Sequence | ORF Start: at 1 | ORF Stop: end of sequence |

GCGGCCAACTCCAAGGTCGCCTTCTCGGCGGTGCGGAGCACCAACCAC

| | | | |
|---|---|---|---|
| NOV9d, CG55184-04 | | | |
| Protein Sequence | SEQ ID NO: 120 | 16 aa | MW at 1659.8kD |

AANSKVAFSAVRSTNH

| | | |
|---|---|---|
| NOV9e, CG55184-05 | SEQ ID NO: 121 | 45 bp |
| DNA Sequence | ORF Start: at 1 | ORF Stop: end of sequence |

GCCAACTCCAAGGTCGCCTTCTCGGCGGTGCGGAGCACCAACCAC

| | | | |
|---|---|---|---|
| NOV9e, CG55184-05 | | | |
| Protein Sequence | SEQ ID NO: 122 | 15 aa | MW at 1588.7kD |

ANSKVAFSAVRSTNH

[0405] A ClustalW comparison of the above protein sequences yields the following sequence alignment shown in Table 9B.

TABLE 9B
Comparison of the NOV9 protein sequences.

| | |
|---|---|
| NOV9a | MGSGRRALSAVPAVLLVLTLPGLPVWAQNDTEPIVLEGKCLVVCDSNPATDSKGSSSSPL |
| NOV9b | MGSGRRALSAVPAVLLVLTLPGLPVWAQNDTEPIVLEGKCLVVCDSNPATDSKGSSSSPL |
| NOV9c | ---------------------------QNDTEPIVLEGKCLVVCDSNPATDSKGSSSSPL |
| NOV9d | ------------------------------------------------------------ |
| NOV9e | ------------------------------------------------------------ |
| NOV9a | GISVRAANSKVAFSAVRSTNHEPSEMSNKTRIIYFDQILVNVGNFFTLESVFVAPRKGIY |
| NOV9b | GISVRAANSKVAFSAVRSTNHEPSEMSNKTRIIYFDQILVNVGNFFTLESVFVAPRKGIY |
| NOV9c | GISVRAANSKVAFSAVRSTNHEPSEMSNKTRIIYFDQILVNVGNFFTLESVFVAPRKGIY |
| NOV9d | -----AANSKVAFSAVRSTNH--------------------------------------- |
| NOV9e | ------ANSKVAFSAVRSTNH--------------------------------------- |
| NOV9a | SFSFHVIKVYQSQTIQVNLMLNGKPVISAFAGDKDVTREAATNGVLLYLDKEDKVYLKLE |
| NOV9b | SFSFHVIKVYQSQTIQVNLMLNGKPVISAFAGDKDVTREAATNGVLLYLDKEDKVYLKLE |
| NOV9c | SFSFHVIKVYQSQTIQVNLMLNGKPVISAFAGDKDVTREAATNGVLLYLDKEDKNYLKLE |
| NOV9d | ------------------------------------------------------------ |
| NOV9e | ------------------------------------------------------------ |
| NOV9a | KGNLVGGWQYSTFSGFLVFPL |
| NOV9b | KGNLVGGWQYSTFSGFLVFPL |
| NOV9c | KGNLVGGWQYSTFSGFLVFPL |
| NOV9d | --------------------- |
| NOV9e | --------------------- |
| NOV9a | (SEQ ID NO: 114) |
| NOV9b | (SEQ ID NO: 116) |
| NOV9c | (SEQ ID NO: 118) |
| NOV9d | (SEQ ID NO: 120) |
| NOV9e | (SEQ ID NO: 122) |

[0406] Further analysis of the NOV9a protein yielded the following properties shown in Table 9C.

TABLE 9C
Protein Sequence Properties NOV9a

| SignalP | Cleavage site between residues 28 and 29 | | | |
|---|---|---|---|---|
| analysis: | | | | |
| PSORT II | PSG: a new signal peptide prediction method | | | |
| analysis: | N-region: length 6; pos. chg 2; neg. chg 0 | | | |
| | H-region: length 23; peak value 10.04 | | | |
| | PSG score: 5.64 | | | |
| | GvH: von Heijne's method for signal seq. recognition | | | |
| | GvH score (threshold: −2.1): 0.95 | | | |
| | possible cleavage site: between 27 and 28 | | | |
| | >>> Seems to have a cleavable signal peptide (1 to 27) | | | |
| | ALOM: Klein et al's method for TM region allocation | | | |
| | Init position for calculation: 28 | | | |
| | Tentative number of TMS(s) for the threshold 0.5: 1 | | | |
| | Number of TMS(s) for threshold 0.5: 0 | | | |
| | PERIPHERAL | Likelihood = 5.67 (at 60) | | |
| | ALOM score: 0.10 (number of TMSs: 0) | | | |
| | MTOP: Prediction of membrane topology (Hartmann et al.) | | | |
| | Center position for calculation: 13 | | | |
| | Charge difference: −5.0 C(−2.0)-N(3.0) | | | |
| | N >= C: N-terminal side will be inside | | | |
| | MITDISC: discrimination of mitochondrial targeting seq | | | |
| | R content: | 2 | Hyd Moment(75): | 11.01 |
| | Hyd Moment(95): | 9.83 | G content: | 3 |
| | D/E content: | 1 | S/T content: | 3 |

Score: −2.58
Gavel: prediction of cleavage sites for mitochondrial preseq
R-2 motif at 16 RRA|LS
NUCDISC: discrimination of nuclear localization signals
pat4: none
pat7: none
bipartite: none
content of basic residues: 9.5%
NLS Score: −0.47
KDEL: ER retention motif in the C-terminus: none
ER Membrane Retention Signals:
XXRR-like motif in the N-terminus: GSGR
none
SKL: peroxisomal targeting signal in the C-terminus: none
PTS2: 2nd peroxisomal targeting signal: none
VAC: possible vacuolar targeting motif: none
RNA-binding motif: none
Actinin-type actin-binding motif:
type 1: none
type 2: none
NMYR: N-myristoylation pattern: none
Prenylation motif: none
memYQRL: transport motif from cell surface to Golgi: none
Tyrosines in the tail: none
Dileucine motif in the tail: none
checking 63 PROSITE DNA binding motifs: none
checking 71 PROSITE ribosomal protein motifs: none
checking 33 PROSITE prokaryotic DNA binding motifs: none
NNCN: Reinhardt's method for Cytoplasmic/Nuclear discrimination
Prediction: cytoplasmic
Reliability: 94.1
COIL: Lupas's algorithm to detect coiled-coil regions
total: 0 residues
Final Results (k = 9/23):
33.3%: extracellular, including cell wall
33.3%: mitochondrial
22.2%: endoplasmic reticulum
11.1%: Golgi
>> prediction for CG55184-03 is exc (k = 9)

[0407] A search of the NOV9a protein against the Geneseq database, a proprietary database that contains sequences published in patents and patent publication, yielded several homologous proteins shown in Table 9D.

TABLE 9D
Geneseq Results for NOV9a

| | | NOV9a | Identities/ | |
|---|---|---|---|---|
| | | Residues/ | Similarities for | |
| Geneseq | Protein/Organism/Length [Patent #, | Match | the Matched | Expect |
| Identifier | Date] | Residues | Region | Value |
| AAE16346 | Human cerebellin-like protein, | 1 . . . 201 | 201/201 (100%) | e−111 |
| | POLY10 - Homo sapiens, 201 aa. | 1 . . . 201 | 201/201 (100%) | |
| | [WO200185767-A2, 15 NOV. 2001] | | | |
| ABB84924 | Human PRO1382 protein sequence | 1 . . . 201 | 201/201 (100%) | e−111 |
| | SEQ ID NO: 216 - Homo sapiens, 201 | 1 . . . 201 | 201/201 (100%) | |
| | aa. [WO200200690-A2, | | | |
| | 03 JAN. 2002] | | | |
| ABB95530 | Human angiogenesis related protein | 1 . . . 201 | 201/201 (100%) | e−111 |
| | PRO1382 SEQ ID NO: 216 - Homo | 1 . . . 201 | 201/201 (100%) | |
| | sapiens, 201 aa. [WO200208284-A2, | | | |
| | 31 JAN. 2002] | | | |
| AAO15422 | Human genset metabolic gene | 1 . . . 201 | 201/201 (100%) | e−111 |
| | (GMG-8) protein - Homo sapiens, 201 | 1 . . . 201 | 201/201 (100%) | |
| | aa. [WO200255694-A2, | | | |
| | 18 JUL. 2002] | | | |
| AAB66151 | Protein of the invention #63 - | 1 . . . 201 | 201/201 (100%) | e−111 |
| | Unidentified, 201 aa. | 1 . . . 201 | 201/201 (100%) | |
| | [WO200078961-A1, 28 DEC. 2000] | | | |

[0408] In a BLAST search of public sequence databases, the NOV9a protein was found to have homology to the proteins shown in the BLASTP data in Table 9E.

TABLE 9E
Public BLASTP Results for NOV9a

| | | NOV9a | | |
|---|---|---|---|---|
| Protein | | Residues/ | Identities/ | |
| Accession | | Match | Similarities for the | Expect |
| Number | Protein/Organism/Length | Residues | Matched Portion | Value |
| Q9NTU7 | Cerebellin-like glycoprotein 1 | 1 . . . 201 | 201/201 (100%) | e−111 |
| | precursor - Homo sapiens (Human), | 1 . . . 201 | 201/201 (100%) | |
| | 201 aa. | | | |
| Q8BME9 | CEREBELLIN-like glycoprotein | 1 . . . 201 | 193/201 (96%) | e−105 |
| | precursor - Mus musculus (Mouse), | 1 . . . 198 | 195/201 (96%) | |
| | 198 aa. | | | |
| Q8BMF0 | CEREBELLIN-like glycoprotein | 1 . . . 201 | 192/201 (95%) | e−104 |
| | precursor - Mus musculus (Mouse), | 1 . . . 198 | 194/201 (95%) | |
| | 198 aa. | | | |
| Q8BGU2 | Cerebellin 2 precursor protein - Mus | 7 . . . 201 | 145/196 (73%) | 2e−76 |
| | musculus (Mouse), 224 aa. | 31 . . . 224 | 170/196 (85%) | |
| P98087 | Cerebellin-like glycoprotein 1 - | 7 . . . 201 | 144/196 (73%) | 6e−76 |
| | Rattus norvegicus (Rat), 224 aa. | 31 . . . 224 | 169/196 (85%) | |

[0409] PFam analysis predicts that the NOV9a protein contains the domains shown in the Table 9F.

TABLE 9F
Domain Analysis of NOV9a

| | | Identities/ | |
|---|---|---|---|
| Pfam | | Similarities | Expect |
| Domain | NOV9a Match Region | for the Matched Region | Value |
| C1q | 72 . . . 198 | 48/137 (35%) | 1.4e−48 |
| | | 113/137 (82%) | |

### Example 10

[0410] The NOV10 clone was analyzed, and the nucleotide and encoded polypeptide sequences are shown in Table 10A.

TABLE 10A
NOV10 Sequence Analysis

| | | |
|---|---|---|
| NOV10a, CG55274-05 | SEQ ID NO: 123 | 274 bp |
| DNA Sequence | ORF Start: ATG at 7 | ORF Stop: TAG at 265 |

ACCACCATGGCACTGCAGGCTGAATTCGACAAGGCTGCAGAAGACGTGAGGAAGCTGCCAACAAGACCAGCAG
ATAATAAAGAACTGAAAAAACTCGATGGACTTTACAAACAAGCTATAATTGGAGACATTAATATTGAGTATCT
GGGAATGCTGGATTTAAAGGGCAAGGCCAAATGCGCAGCATGGACCCTCCAAAAAAGGTTGTCAAAGGAAGAT
GCAACGAGTGTCTCTATTTCTAAGGCAAAAGAGCCGATAGAAAAATAGGACATTT

| | | | |
|---|---|---|---|
| NOV10a, CG55274-05 | | | |
| Protein Sequence | SEQ ID NO: 124 | 86 aa | MW at 9590.0kD |

MALQAEFDKAAEDVRKLPTRPADNKELKKLDGLYKQAIIGDINIEYLGMLDLKGKAKCAAWTLQKRLSKEDAT
SVSISKAKEPIEK

| | | |
|---|---|---|
| NOV10b, CG55274-01 | SEQ ID NO: 125 | 280 bp |
| DNA Sequence | ORF Start: ATG at 7 | ORF Stop: TAG at 265 |

ACCACCATGGCACTGCAGGCTGAATTCGACAAGGCTGCAGAAGACGTGAGGAAGCTGCCAACAAGACCAGCAG
ATAATAAAGAACTGAAAAAACTCGATGGACTTTACAAACAAGCTATAATTGGAGACATTAATATTGAGTATCT
GGGAATGCTGGACTTTAAGGGCAAGGCCAAATGCGCAGCATGGACCCTCCAAAAAAGGTTGTCAAAGGAAGAT
GCAACGAGTGTCTCTATTTCTAAGGCAAAAGAGCCGATAGAAAAATAGGACATTTAGAATA

| | | | |
|---|---|---|---|
| NOV10b, CG55274-01 | | | |
| Protein Sequence | SEQ ID NO: 126 | 86 aa | MW at 9624.1kD |

MALQAEFDKAAEDVRKLPTRPADNKELKKLDGLYKQAIIGDINIEYLGMLDFKGKAKCAAWTLQKRLSKEDAT
SVSISKAKEPIEK

| | | |
|---|---|---|
| NOV10c, CG55274-02 | SEQ ID NO: 127 | 289 bp |
| DNA Sequence | ORF Start: ATG at 17 | ORF Stop: TAG at 272 |

TGCGGCCGCCACCACCATGGCACTGCAGGCTGATCGAGACAAGGCTGCAGAAGACGTGAGGAAGCTGCCAACA
AGACCAGATGAGAAAGAACTGAAAAAACTCGATGGACTTTACAAACAAGCTATAATTGGAGACATTAATATTG
AGTATCTGGGAATGCTGGATTTAAAGGGCAAGGCCAAATGCGCAGCATGGACCCTCCAAAAAAGGTTGTCAAA
GGAAGATGCAACGAGTGTCTCTATTTCTAAGGCAAAACAGCCGATAGAAAAATAGGACATTTAGAATACA

| | | | |
|---|---|---|---|
| NOV10c, CG55274-02 | | | |
| Protein Sequence | SEQ ID NO: 128 | 85 aa | MW at 9528.9kD |

MALQADRDKAAEDVRKLPTRPDEKELKKLDGLYKQAIIGDINIEYLGMLDLKGKAKCAAWTLQKRLSKEDATS
VSISKAKEPIEK

| | | |
|---|---|---|
| NOV10d, CG55274-03 | SEQ ID NO: 129 | 60 bp |
| DNA Sequence | ORF: Start a 1 | ORF Stop: end of sequence |

CAAGCTATAATTGGAGACATTAATATTGAGTATCTGGGAATGCTGGATTTAAAGGGCAAG

| | | | |
|---|---|---|---|
| NOV10d, CG55274-03 | | | |
| Protein Sequence | SEQ ID NO: 130 | 20 aa | MW at 2204.6kD |

QAIIGDINIEYLGMLDLKGK

| | | |
|---|---|---|
| NOV10e, CG55274-04 | SEQ ID NO: 131 | 54 bp |
| DNA Sequence | ORF Start: at 1 | ORF Stop: end of sequence |

CAAGCTATAATTGGAGACATTAATATTGAGTATCTGGGAATGCTGGACTTTAAG

| | | | |
|---|---|---|---|
| NOV10e, CG55274-04 | | | |
| Protein Sequence | SEQ ID NO: 132 | 18 aa | MW at 2053.4kD |

QAIIGDINIEYLGMLDFK

[0411] A ClustalW comparison of the above protein sequences yields the following sequence alignment shown in Table 10B.

TABLE 10B
Comparison of the NOV10 protein sequences.

| | |
|---|---|
| NOV10a | MALQAEFDKAAEDVRKLPTRPADNKELKKLDGLYKQAIIGDINIEYLGMLDLKGKAKCAA |
| NOV10b | MALQAEFDKAAEDVRKLPTRPADNKELKKLDGLYKQAIIGDINIEYLGMLDFKGKAKCAA |
| NOV10c | MALQADRDKAAEDVRKLPTRPDE-KELKKLDGLYKQAIIGDINIEYLGMLDLKGKAKCAA |
| NOV10d | -----------------------------------QAIIGDINIEYLGMLDLKGK----- |
| NOV10e | -----------------------------------QAIIGDINIEYLGMLDFK------- |
| NOV10a | WTLQKRLSKEDATSVSISKAKEPIEK |
| NOV10b | WTLQKRLSKEDATSVSTSKAKEPIEK |
| NOV10c | WTLQKRLSKEDATSVSISKAKEPIEK |
| NOV10d | -------------------------- |
| NOV10e | -------------------------- |
| NOV10a | (SEQ ID NO: 124) |
| NOV10b | (SEQ ID NO: 126) |
| NOV10c | (SEQ ID NO: 128) |
| NOV10d | (SEQ ID NO: 130) |
| NOV10e | (SEQ ID NO: 132) |

[0412] Further analysis of the NOV10a protein yielded the following properties shown in Table 10C.

TABLE 10C
Protein Sequence Properties NOV10a

| SignalP | No Known Signal Sequence Predicted | | | |
|---|---|---|---|---|
| analysis: | | | | |
| PSORT II | PSG: a new signal peptide prediction method | | | |
| analysis: | N-region: length 9; pos. chg 1; neg. chg 2 | | | |
| | H-region: length 2; peak value 0.00 | | | |
| | PSG score: −4.40 | | | |
| | GvH: von Heijne's method for signal seq. recognition | | | |
| | GvH score (threshold: −2.1): −10.68 | | | |
| | possible cleavage site: between 58 and 59 | | | |
| | >>> Seems to have no N-terminal signal peptide | | | |
| | ALOM: Klein et al's method for TM region allocation | | | |
| | Init position for calculation: 1 | | | |
| | Tentative number of TMS(s) for the threshold 0.5: 0 | | | |
| | number of TMS(s) . . . fixed | | | |
| | PERIPHERAL | Likelihood = 7.11 (at 36) | | |
| | ALOM score: 7.11 (number of TMSs: 0) | | | |
| | MITDISC: discrimination of mitochondrial targeting seq | | | |
| | R content: | 0 | Hyd Moment(75): | 3.71 |
| | Hyd Moment(95): | 2.95 | G content: | 0 |
| | D/E content: | 2 | S/T content: | 0 |

```
Score: −7.75
Gavel: prediction of cleavage sites for mitochondrial preseq
cleavage site motif not found
NUCDISC: discrimination of nuclear localization signals
pat4: none
pat7: none
bipartite: none
content of basic residues: 19.8%
NLS Score: −0.47
KDEL: ER retention motif in the C-terminus: none
ER Membrane Retention Signals: none
SKL: peroxisomal targeting signal in the C-terminus: none
PTS2: 2nd peroxisomal targeting signal: none
VAC: possible vacuolar targeting motif: none
RNA-binding motif: none
Actinin-type actin-binding motif:
type 1: none
type 2: none
NMYR: N-myristoylation pattern: none
Prenylation motif: none
memYQRL: transport motif from cell surface to Golgi: none
Tyrosines in the tail: none
Dileucine motif in the tail: none
checking 63 PROSITE DNA binding motifs: none
checking 71 PROSITE ribosomal protein motifs: none
checking 33 PROSITE prokaryotic DNA binding motifs: none
NNCN: Reinhardt's method for Cytoplasmic/Nuclear discrimination
Prediction: nuclear
Reliability: 76.7
COIL: Lupas's algorithm to detect coiled-coil regions
total: 0 residues
Final Results (k = 9/23):
82.6%: nuclear
  4.3%: cytoskeletal
  4.3%: mitochondrial
  4.3%: cytoplasmic
  4.3%: peroxisomal
>> prediction for CG55274-05 is nuc (k = 23)
```

[0413] A search of the NOV10a protein against the Geneseq database, a proprietary database that contains sequences published in patents and patent publication, yielded several homologous proteins shown in Table 10D.

TABLE 10D
Geneseq Results for NOV10a

| | | NOV10a | Identities/ | |
|---|---|---|---|---|
| | | Residues/ | Similarities for | |
| Geneseq | Protein/Organism/Length [Patent #, | Match | the Matched | Expect |
| Identifier | Date] | Residues | Region | Value |
| AAB81814 | Human endozepine-like ENDO5 SEQ | 1 . . . 86 | 85/86 (98%) | 1e−42 |
| | ID NO: 10 - Homo sapiens, 86 aa. | 1 . . . 86 | 85/86 (98%) | |
| | [WO200125436-A2, 12 APR. 2001] | | | |
| ABU11538 | Human MDDT polypeptide SEQ ID 485 - | 1 . . . 86 | 64/86 (74%) | 1e−26 |
| | Homo sapiens, 100 aa. | 13 . . . 97 | 70/86 (80%) | |
| | [WO200279449-A2, 10 OCT. 2002] | | | |
| AAB81811 | Human endozepine-like ENDO4 SEQ | 3 . . . 86 | 61/84 (72%) | 5e−25 |
| | ID NO: 8 - Homo sapiens, 96 aa. | 11 . . . 93 | 68/84 (80%) | |
| | [WO200125436-A2, 12 APR. 2001] | | | |
| ABJ05397 | Frog acyl coenzyme A binding protein | 4 . . . 86 | 57/83 (68%) | 2e−23 |
| | (ACBP) - Rana sp, 86 aa. | 2 . . . 83 | 66/83 (78%) | |
| | [WO200261096-A1, 08 AUG. 2002] | | | |
| ABJ05396 | Duck acyl coenzyme A binding protein | 4 . . . 86 | 55/83 (66%) | 3e−23 |
| | (ACBP) 2 - Anas sp, 86 aa. | 2 . . . 83 | 66/83 (79%) | |
| | [WO200261096-A1, 08 AUG. 2002] | | | |

[0414] In a BLAST search of public sequence databases, the NOV10a protein was found to have homology to the proteins shown in the BLASTP data in Table 10E.

TABLE 10E
Public BLASTP Results for NOV10a

| | | NOV10a | Identities/ | |
|---|---|---|---|---|
| Protein | | Residues/ | Similarities for | |
| Accession | | Match | the Matched | Expect |
| Number | Protein/Organism/Length | Residues | Portion | Value |
| Q8N6N7 | Similar to RIKEN cDNA 9230116B18 | 1 . . . 86 | 64/86 (74%) | 4e−26 |
| | gene - Homo sapiens (Human), 88 aa. | 1 . . . 85 | 70/86 (80%) | |
| Q9D258 | 9230116B18Rik protein - Mus musculus | 1 . . . 86 | 60/86 (69%) | 3e−25 |
| | (Mouse), 88 aa. | 1 . . . 85 | 70/86 (80%) | |
| A57711 | diazepam-binding inhibitor - laughing | 1 . . . 86 | 58/86 (67%) | 2e−23 |
| | frog, 88 aa. | 1 . . . 85 | 68/86 (78%) | |
| P45883 | Acyl-CoA-binding protein homolog | 4 . . . 86 | 57/83 (68%) | 4e−23 |
| | (ACBP) (Diazepam binding inhibitor | 3 . . . 84 | 66/83 (78%) | |
| | homolog) (DBI) - Rana ridibunda | | | |
| | (Laughing frog) (Marsh frog), 87 aa. | | | |
| P45882 | Acyl-CoA-binding protein (ACBP) | 4 . . . 86 | 55/83 (66%) | 7e−23 |
| | (Diazepam binding inhibitor) (DBI) | 19 . . . 100 | 66/83 (79%) | |
| | (Endozepine) (EP) - Anas platyrhynchos | | | |
| | (Domestic duck), 103 aa. | | | |

[0415] PFam analysis predicts that the NOV10a protein contains the domains shown in the Table 10F.

TABLE 10F
Domain Analysis of NOV10a

| | | Identities/ | |
|---|---|---|---|
| Pfam | | Similarities | Expect |
| Domain | NOV10a Match Region | for the Matched Region | Value |
| ACBP | 3 . . . 86 | 42/90 (47%) | 5.1e−18 |
| | | 66/90 (73%) | |

### Example 11

[0416] The NOV11 clone was analyzed, and the nucleotide and encoded polypeptide sequences are shown in Table 11A.

TABLE 11A
NOV11 Sequence Analysis

| | | |
|---|---|---|
| NOV11a, CG55379-04 | SEQ ID NO: 133 | 6291 bp |
| DNA Sequence | ORF Start: ATG at 1 | ORF Stop: TAG at 3763 |

ATGGCGCGGGGGGACGCCGGCCGCGGCCGCGGGCTCCTCGCGTTGACCTTCTGCCTGTTGGCCGCGCGCGGGG
AGCTGCTGTTGCCCCAGGAGACGACTGTGGAGCTGAGCTGTGGAGTGGGGCCACTGCAAGTGATCCTGGGCCC
AGAGCAGGCTGCAGTGCTAAACTGTAGCCTGGGGGCTGCTGCCGCTGGACCCCCCACCAGGGTGACCTGGAGC
AAGGATGGGGACACCCTGCTGGAGCACGACCACTTACACCTGCTGCCCAATGGTTCCCTGTGGCTGTCCGAGC
CACTAGCACCCAATGGCAGTGACGAGTCAGTCCCTGAGGCTGTGGGGGTCATTGAAGGCAACTATTCGTGCCT
AGCCCACGGCCCCCTCGGAGTGCTGGCCAGCCAGACTGCTGTCGTCAAGCTTGCCAGTCTCGCAGACTTCTCT
CTGCACCCGGAGTCTCAGACGGTGGAGGAGAACGGGACAGCTCGCTTTGAGTGCCACATTGAAGGGCTGCCAG
CTCCCATCATTACTTGGGAGAAGGACCAGGTGACATTGCCTGAGGAGCCTCGGCTCATCGTGCTTCCCAACGG
CGTCCTTCAGATCCTGGATGTTCAGGAGAGTGATGCAGGCCCCTACCGCTGCGTGGCCACCAACTCAGCTCGC
CAGCACTTCAGCCAGGAGGCCCTACTCAGTGTGGCCCACAGAGGTTCCCTGGCGTCCACCAGGGGGCAGGACG
TGGTCATTGTGGCAGCCCCAGAGAACACCACAGTGGTGTCTGGCCAGAGTGTGGTGATGGAATGTGTGGCCTC
AGCTGACCCCACCCCTTTTGTGTCCTGGGTCCGAGACGGGAAGCCCATCTCCACAGATGTCATCGTCCTGGGC
CGCACCAACCTACTAATTGCCAACGCGCAGCCCTGGCACTCCGGCGTCTATGTCTGCCGCGCCAACAAGCCCC
GCACGCGCCACTTCGCCACTGCAGCCGCTGAGCTCCGTGTGCTGCTAGCGGCTCCCGCCATCACTCAGGCGCC
CGAGGCGCTGTCGCGGACGCGGGCGAGCACAGCGCGCTTCGTGTGCCGCGCGTCGGGGGAGCCGCGGCCAGCG
CTGCGCTGGCTGCACAACGGGGCGCCGCTGCGGCCCAACGGGCGCGTCAAGGTCCAGGGCGGCGGTGGCAGCC
TGGTCATCACACAGATCGGCCTGCAGGACGCCGGCTACTACCAGTGCGTGGCTGAGAACAGCGCGGGAATGGC
GTGCGCTGCCGCGTCGCTGGCCGTGGTGGTGCGCGAGGGGCTGCCCAGCGCCCCCACGCGGGTCACTGCTACG
CCACTGAGCAGCTCCGCTGTGTTGGTGGCCTGGGAGCGGCCCGAGATGCACAGCGAGCAGATCATCGGCTTCT
CTCTCCACTACCAGAAGGCACGGGGTATGGACAATGTGGAATACCAGTTTGCAGTGAACAACGACACCACAGA
ACTACAGGTTCGGGACCTGGAACCCAACACAGATTATGAGTTCTACGTGGTGGCCTACTCCCAGCTGGGAGCC
AGCCGCACCTCCACCCCAGCACTGGTGCACACACTGGATGATGTCCCCAGTGCAGCACCCCAGCTCTCCCTGT
CCAGCCCCAACCCTTCGGACATCAGGGTGGCGTGGCTGCCCCTGCCCCCCAGCCTGAGCAATGGGCAGGTGGT
GAAGTACAAGATAGAATACGGTTTGGGAAAGGAAGGTGAGTGGGGGGATCAGATTTTCTCTACTGAGGTGCGA
CGAAATGAGACACAGCTTATGCTGAACTCGCTTCAGCCAAACAAGGTGTATCGAGTACGGATTTCGGCTGGTA
CAGCAGCCGGCTTCGGGGCCCCCTCCCAGTGGATGCATCACAGGACGCCCAGTATGCACAACCAGAGCCATGT
CCCTTTTGCCCCTGCAGAGTTGAAGGTGCAGGCAAAGATGGAGTCCCTGGTCGTGTCATGGCAGCCACCCCCT
CACCCCACCCAGATCTCTGGCTACAAACTATATTGGCGGGAGGTGGGGGCTGAGGAGGAGGCCAATGGCGATC
GCCTGCCAGGGGGCCGTGGAGACCAGGCTTGGGATGTGGGGCCTGTCCGGCTCAAGAAGAAAGTGAAGCAGTA
TGAGCTGACCCAGCTAGTCCCTGGCCGGCTGTACGAGGTGAAGCTCGTGGCTTTCAACAAACATGAGGATGGC
TATGCAGCAGTGTGGAAGGGCAAGACGGAGAAGGCGCCGGCACCAGACATGCCTATCCAGAGGGGACCACCCC
TGCCTCCAGCCCACGTCCATGCGGAATCAAACAGCTCCACATCCATCTGGCTTCGGTGGAAAAAGCCAGATTT
CACCACAGTCAAGATTGTCAACTACACTGTGCGCTTCAGCCCCTGGGGGCTCAGGAATGCCTCCCTGGTCACC
TATTACACCAGTTCTGGAGAAGACATCCTCATTGGCGGCTTGAAGCCATTCACCAAATACGAGTTTGCAGTGC
AGTCTCACGGCGTGGACATGGATGGGCCTTTCGGCTCTGTGGTGGAGCGCTCCACCCTGCCTGACCGGCCCTC
CACACCCCCATCCGACCTGCGACTGAGCCCCCTGACACCGTCCACGGTTCGGCTGCACTGGTGCCCCCCCACA
GAGCCCAACGGGGAGATCGTCGAGTATCTGATCCTGTACAGCAGCAACCACACGCAGCCTGAGCACCAGTGGA
CCTTGCTCACCACGCAGGGAAACATCTTCAGTGCTGAGGTCCATGGCCTGGAGAGCGACACTCGGTACTTCTT
CAAGATGGGGGCGCGCACAGAGGTGGGACCTGGGCCTTTCTCCCGCCTGCAGGATGTGATCACGCTCCAGGAG
AAGCTGTCAGACTCGCTGGACATGCACTCAGTCACGGGCATCATCGTGGGTGTCTGCCTGGGCCTCCTCTGCC
TCCTGGCCTGCATGTGTGCTGGCCTGCGCCGCAGCCCCCACAGGGAATCCCTCCCAGGCCTGTCCTCCACCGC
CACCCCCGGGAATCCCGCGCTGTACTCCAGAGCTCGGCTTGGCCCCCCCAGCCCCCCAGCTGCCCATGAATTG
GAGTCCCTTGTGCACCCCCATCCCCAGGACTGGTCCCCGCCACCCTCAGACGTGGAGGACAGGGCTGAAGTGC
ACAGCCTTATGGGTGGCGGTGTTTCTGAAGGCCGGAGTCACTCCAAAAGAAAGATCTCCTGGGCTCAACCAAG
CGGGCTGAGCTGGGCTGGTTCCTGGGCAGGCTGTGAGCTGCCCCAGGCAGGCCCCCGGCCGGCTCTGACCCGG
GCCCTGCTGCCCCCTGCTGGAACTGGGCAGACGCTGTTGCTGCAGGC
TCTGGTGTACGACGCCATAAAGGGCAATGGGAGGAAGAAGTCACCCCCAGCCTGCAGGAACCAGGTGGAGGCT
GAAGTCATTGTCCACTCTGACTTTAGTGCATCTAACGGGAACCCTGACCTCCATCTCCAAGACCTGGAGCCTG
AGGACCCCCTGCCTCCAGAGGCTCCTGATCTCATCTCGGGTGTTGGGGATCCAGGGCAGGGGGCAGCCTGGCT
GGACAGGGAGTTGGGAGGGTGTGAGCTGGCAGCCCCCGGGCCAGACAGACTTACCTGCTTGCCAGAGGCAGCC
AGTGCTTCCTGCTCCTACCCGGACCTCCAGCCAGGCGAGGTGCTAGAGGAGACCCCTGGAGATAGCTGCCAGC
TCAAATCCCCCTGCCCTCTAGGAGCCAGCCCAGGCCTGCCCAGATCCCCGGTCTCCTCCTCTGCCTAGCTCTT
CCCAGAGGATGTGGTTTGGGGCAGGCAGGTATGGATCACATAGGATGCGATACCTGTGGCCGTGTATGTCCAC
ATGTGTGCCTGTAGATACATCATCAAGCCCTTTGGAGCTTCCTAAGTTGCTTTGGCTGAGGGGAGAGGAAAAC
ATGGATTATTCACTCCCCCCATACTCTTTGTGATACACATGTGACATGTGAAAGACATACGAGACATAGCTAC
ATGTGATGTGCACATGTGTGAAGTGCATGTATGCGTACTGGTTGTTGAGCTGGGAAACCGTGGCCCAGGCAGT
GGTCACTACAGCCTGATTGGTCCTCCAGGTCAGAACGGTGCCCCACAGTGGTCAGTCCCCAGCCCTGTGGGCC
CCCACCTCCATCGCCCAGCCTTTTATTACACACTCTGAGAGTGTCTCCAATGCCTGTCTGACAAAGACAGTCC
CAGCCCATTCTCCTGTCTGGCTGGGTTGGGTGCAAGCAGGCTCTGAATGCCTGGCATTTCAGCTGCATCACCT
CCCAGCTCCTTATTGCCCAAATAGAGAGGGTGGCCCTGGCTCCCCTCCGAGCAACTCTGCATTTAATTTTGTA
ATCTGGGAAGTGCCTGGTTTTGAAAATCCGCTTTCTCTCACTCTTCCCCTCCTTCCTTGCCCCTGGCTGCTCT
AGTGTTCTGTCTCCCAGTCACCTCGCTCTCCCAGCACCAGTGCCCTTCTCCTGCTCCCAGATACTCTTTCCTT
TCCTCTCTCCTGTTTTCCTTCCTCTGCTATCTCTCACACCTCTCCCAGACTATGTCATCTTGTTCTCCTGCCT
GGGTTCAAACTCTGCATCCTTCTCTAACAACGTGACTACCTCATGTCTGCTTCAAGGCCCCCGTGCCCTTCCT
GTATCCGCGGCTGCCGCGCACTCGCCTGCCATCCTCCTGCCTCCTCTTCACTCAGTGCTTCTGCTTGCCCTGC
CCCAGGCAGCCCACCCACGCCCAGTCCGGGTGTGGAGAAGATCTTCTGGCTTCCCTGCATCTTGCCTTTGGGA
TTGGGATCCAAGGGTTCTCCATGGATGGATCCAAGTCATAGAGGGGAATGTTTGAGACAGGGAAGGGGGCTGT
GATCCAGAGGCTCAGAATAAAAAGATGCCCTCCCTTCTATGCAGGGGGGCAAGTTTACTGGATGGAGATGATT
TGGGCCTCTCTTCCAGAAGAAGCTAAAGGAAGAGAAGGGGAGTGAGAGTTCAGGGAGGCCCTTCCCACCCTGT
GAGGCTTGACTTGATCTGGATTGGGGATGACAGGAATCTCACCCTCTGGGGTGCTGGCAAGGAGGTCTTTGCA
CAGGAAAAGGGGTAGCTCATTTCAGTTTGTTTTTTCTTTAAATTGAATCCTCAAGTCATTTTCTGTTCACCTG
CCGCACAGGGACAAGCTTGACTTCTATTTTCTGTGTAGTGAAAACAATGTCATTTATTTGGTTTTTCACCTCA
GCCCTCTCATAGGAGCATAGAATGTTAGGGTCTTTACTCCCTAATGATGTCTGATTGGCACATCAAGAGTTAA
CTCTGCCTTCTGGGCCAAATTCGAAATAACCAGTCCATTTTTCCTTTTTTTTTTTTTTTTTTTTTTTTAAATG
GTGGAATGTCTCTCAGCACAGTTGCGGCTTCCTCAAACCCTGAAAGCATCTGTGTTTATTATACTCGGGTGTC
ACTCACTGTTGATGTCTGCACCTACGTTTCCACCTCCTCCCCCTCCTTCAGCCAGCCTATGATAACACTAAAG
ATTATTAATGTTGGTTTTGTATCTCGTTAAAGACAGAATTGTCACTTGTAGTATTTCTGTAGCATTCAGCGCT
GCTGTGGCTAACACCACTGTGTATGTTTCATCATTGCTCTGAAGGTCAAAAGCCTCATTTTATTTTGCTGGTT
TGATTTTTTTTTTTTAAAGAAGAAAAAAAAACTGCCCTGAATTAAATGGCTGTTTTAACAGTAGGCTCTTAGC
ATTATACCACATAGTCATTTTTCATGTTCTTGTTTAACAGGCACTGAGGTTCTGGTTTAAATTAAATAGCTGC
AAATGAGACAATTTATAACCCATTAGGTTGGGTGGAAAATTGTTTCTCAAAAGCAAATAAGTAATAAATCTGG
TATCTGCCTATAACTCACAGTTGATAAGAAAGTGGCCATTTCTCACTAGCACTATATATGATTTGGGCTCTGG
GTAATTTGGAAGTGTTAGGTTTGTGTCTTTGTAGCAGTATTTTTATTAGAAAAGAATCTATTGGCCTTTTACA
GGGTATTAATCCCTTTGTCACCTACCATTGATGCCTTAAGTTTTCTGAGTCTCAATTAAAAATCTTCCTTTTC
TTGATGCATGACAAGTGTAATCAGTACTTGCTCATTTATTTGTCTGTATTTAGTTTATGCTGTACTATTTAAT
TATCCTTCCAGCGTTTTTTTTTTCTCCTTACAAATATGATACTCTTTAGTGTTAAGCTAAGGCATTGATTCAT
GTATCTGTCCTTATAATGAATTAATAAACTATTTTCCAG

| | | | |
|---|---|---|---|
| NOV11a, CG55379-04 | | | |
| Protein Sequence | SEQ ID NO: 134 | 1254 aa | MW at 13408.7kD |

MARGDAGRGRGLLALTFCLLAARGELLLPQETTVELSCGVGPLQVILGPEQAAVLNCSLGAAAAGPPTRVTWS
KDGDTLLEHDHLHLLPNGSLWLSQPLAPNGSDESVPEAVGVIEGNYSCLAHCPLGVLASQTAVVKLASLADFS
LHPESQTVEENGTARFECHIEGLPAPIITWEKDQVTLPEEPRLIVLPNGVLQILDVQESDAGPYRCVATNSAR
QHFSQEALLSVAHRGSLASTRGQDVVIVAAPENTTVVSGQSVVMECVASADPTPFVSWVRDGKPISTDVIVLG
RTNLLIANAQPWHSGVYVCRANKPRTRDFATAAAELRVLLAAPAITQAPEALSRTRASTARFVCRASGEPRPA
LRWLHNGAPLRPNGRVKVQGGGGSLVITQIGLQDAGYYQCVAENSAGMACAAASLAVVVREGLPSAPTRVTAT
PLSSSAVLVAWERPEMHSEQIIGFSLHYQKARGMDNVEYQFAVNNDTTELQVRDLEPNTDYEFYVVAYSQLGA
SRTSTPALVHTLDDVPSAAPQLSLSSPNPSDIRVAWLPLPPSLSNGQVVKYKIEYGLGKEGEWGDQIFSTEVR
GNETQLMLNSLQPNKVYRVRISAGTAAGFGAPSQWMHHRTPSMHNQSHVPFAPAELKVQAKMESLVVSWQPPP
HPTQISGYKLYWREVGAEEEANGDRLPGGRGDQAWDVGPVRLKKKVKQYELTQLVPGRLYEVKLVAFNKHEDG
YAAVWKGKTEKAPAPDMPIQRGPPLPPAHVHAESNSSTSIWLRWKKPDFTTVKIVNYTVRFSPWGLRNASLVT
YYTSSGEDILIGGLKPFTKYEFAVQSHGVDMDGPFGSVVERSTLPDRPSTPPSDLRLSPLTPSTVRLHWCPPT
EPNGEIVEYLILYSSNHTQPEHQWTLLTTQGNIFSAEVHGLESDTRYFFKMGARTEVGPGPFSRLQDVITLQE
KLSDSLDMHSVTGIIVGVCLGLLCLLACMCAGLRRSPHRESLPGLSSTATPGNPALYSRARLGPPSPPAAHEL
ESLVHPHPQDWSPPPSDVEDRAEVHSLMGGGVSEGRSHSKRKISWAQPSGLSWAGSWAGCELPQAGPRPALTR
ALLPPAGTGQTLLLQALVYDAIKGNGRKKSPPACRNOVEAEVIVHSDFSASNGNPDLHLQDLEPEDPLPPEAP
DLISGVGDPGQGAAWLDRELGGCELAAPGPDRLTCLPEAASASCSYPDLQPGEVLEETPGDSCQLKSPCPLGA
SPGLPRSPVSSSA

| | | |
|---|---|---|
| NOV11b, CG55379-01 | SEQ ID NO: 135 | 3741 bp |
| DNA Sequence | ORF Start: ATG at 1 | ORF Stop: end of sequence |

ATGGCGCGGGGGGACGCCGGCCGCGGCCGCGGGCTCCTCGCGTTGACCTTCTGCCTGTTGGCCGCGCGCGGGG
AGCTGCTGTTGCCCCAGGAGACGACTGTGGAGCTGAGCTGTGGAGTGGGGCCACTGCAAGTGATCCTGGGCCC
AGAGCAGGCTGCAGTGCTAAACTGTAGCCTGGGGGCTGCTGCCGCTGGACCCCCCACCAGGGTGACCTGGAGC
AAGGATGGGGACACCCTGCTGGAGCACGACCACTTACACCTGCTGGCCAATGGTTCCCTGTGGCTGTCCCAGC
CACTAGCACCCAATGGCAGTGACGAGTCAGTCCCTGAGGCTGTCGGGGTCATTGAAGGCAACTATTCGTGCCT
ACCCCACGGNCCCCCTCGAGTGCTGGCCAGCCAGACTGCTGTCGTCAAGCTTGCCAGTCTCGCAGACTTCTCT
CTGCACCCGGAGTCTCAGACGGTGGAGGAGAACGGGACAGCTCGCTTTGAGTGCCACATTGAAGGGCTGCCAG
CTCCCATCATTACTTGGGAGAAGGACCAGGTGACATTGCCTGAGGAGCCTCGGCTCATCGTGCTTCCCAACGG
CGTCCTTCAGATCCTGGATGTTCAGGAGAGTGATGCAGGCCCCTACCGCTGCGTGGCCACCAACTCAGCTCGC
CAGCACTTCAGCCAGGAGGCCCTACTCAGTGTGGCCCACAGAGGTTCCCTGGCGTCCACCAGGGGGCAGGACG
TGGTCATTGTGGCAGCCCCAGAGAACACCACAGTGGTGTCTGGCCAGAGTGTGGTGATGGAATGTGTGGCCTC
AGCTGACCCCACCCCTTTTGTGTCCTGGGTCCGAGACGGGAAGCCCATCTCCACAGATGTCATCGTCCTGGGC
CGCACCAACCTACTAATTGCCAACGCGCAGCCCTGGCACTCCGGCGTCTATGTCTGCCGCGCCAACAAGCCCC
GCACGCGCGACTTCGCCACTGCAGCCGCTGAGCTCCGTGTGCTGCTAGCGGCTCCCGCCATCACTCAGGCGCC
CGAGGCGCTGTCGCGGACGCGGGCGAGCACAGCGCGCTTCGTGTGCCGCGCGTCGGGGGAGCCGCGGCCAGCG
CTGCGCTGGCTGCACAACGGGGCGCCGCTGCGGCCCAACGGGCGCGTCAAGGTCCAGGGCGGCGGTGGCAGCC
TGGTCATCACACAGATCGGCCTGCAGGACGCCGGCTACTACCAGTGCGTGGCTGAGAACAGCGCGGGAATGGC
GTGCGCTGCCGCGTCGCTGGCCGTGGTGGTGCGCGAGGGGCTGCCCAGCGCCCCCACGCGGGTCACTGCTACG
CCACTGAGCAGCTCCGCTGTGTTGGTGGCCTGGGAGCGGCCCGAGATGCACAGCGAGCAGATCATCGGCTTCT
CTCTCCACTACCAGAAGGCACGGGGTATGGACAATGTGGAATACCAGTTTGCAGTGAACAACGACACCACAGA
ACTACAGGTTCGGGACCTGGAACCCAACACAGATTATGAGTTCTACGTGGTGGCCTACTCCCAGCTGGGAGCC
AGCCGCACCTCCACCCCAGCACTGGTGCACACACTGGATGATGTCCCCAGTGCAGCACCCCAGCTCTCCCTGT
CCAGCCCCAACCCTTCGGACATCAGGGTGGCGTGGCTGCCCCTGCCCCCCAGCCTGAGCAATGGGCAGGTGGT
GAAGTACAAGATAGAATACGGTTTGGGAAAGGAAGATCAGATTTTCTCTACTGAGGTGCGAGGAAATGAGACA
CAGCTTATGCTGAACTCGCTTCAGCCAAACAAGGTGTATCGAGTACGGATTTCGGCTGGTACAGCAGCCGGCT
TCGGGGCCCCCTCCCAGTGGATGCATCACAGGACGCCCAGTATGCACAACCAGAGCCATGTCCCTTTTGCCCC
TGCAGAGTTGAAGGTGCAGGCAAAGATGGAGTCCCTGGTCGTGTCATGGCAGCCACCCCCTCACCCCACCCAG
ATCTCTGGCTACAAACTATATTGGCGGGAGGTGGGGGCTGAGGAGGAGGCCAATGGCGATCGCCTGCCAGGGG
GCCGTGGAGACCAGGCTTGGGATGTGGGGCCTGTCCGGCTCAAGAAGAAAGTGAAGCAGTATGAGCTGACCCA
GCTAGTCCCTGGCCGGCTGTACGAGGTGAAGCTCGTGGCTTTCAACAAACATGAGGATGGCTATGCAGCAGTG
TGGAAGGGCAAGACGGAGAAGGCGCCGGCACCAGACATGCCTATCCAGAGGGGACCACCCCTGCCTCCAGCCC
ACGTCCATGCGGAATCAAACAGCTCCACATCCATCTGGCTTCGGTGGAAAAAGCCAGATTTCACCACAGTCAA
GATTGTCAACTACACTGTGCGCTTCAGCCCCTGGGGGCTCAGGAATGCCTCCCTGGTCACCTATTACAGTTCT
GGAGAAGACATCCTCATTGGCGGCTTGAAGCCATTCACCAAATACGAGTTTGCAGTGCAGTCTCACGGCGTGG
ACATGGATGGGCCTTTCGGCTCTGTGGTGGAGCGCTCCACCCTGCCTGACCGTCCCTCCACACCCCCATCCGA
CCTGCGACTGAGCCCCCTGACACCGTCCACGGTTCGGCTGCACTGGTGCCCCCCCACAGAGCCCAACGGGGAG
ATCGTGGAGTATCTGATCCTGTACAGCAGCAACCACACGCAGCCTGAGCACCAGTGGACCTTGCTCACCACGC
AGGGTGAGGGAAACATCTTCAGTGCTGAGGTCCATGGCCTGGAGAGCGACACTCGGTACTTCTTCAAGATGGG
GGCGCGCACAGAGGTGGGACCTGGGCCTTTCTCCCGCCTGCAGGATGTGATCACGCTCCAGGAGAAGCTGTCA
GACTCGCTGGACATGCACTCAGTCACGGGCATCATCGTGGGTGTCTGCCTGGGCCTCCTCTGCCTCCTGGCCT
GCATGTGTGCTGGCCTGCGCCGCAGCCCCCACAGGGAATCCCTCCCAGGCCTGTCCTCCACCGCCACCCCCGG
GAATCCCGCGCTGTACTCCAGAGCTCGGCTTGGCCCCCCCAGCCCCCCAGCTGCCCATGAATTGGAGTCCCTT
GTGCACCCCCATCCCCAGGACTGGTCCCCGCCACCCTCAGACGTGGAGGACAGGGCTGAAGTGCACAGCCTTA
TGGGTGGCGGTGTTTCTGAAGGCCGGAGTCACTCCAAAAGAAAGGTAAGTGCTCAACCAAGCGGGCTGAGCTG
GGCTGGTTCCTGGGCAGGCTGTGAGCTGCCCCAGGCAGGCCCCCGGCCGGCTCTGACCCGGGCCCTGCTGCCC
CCTGCTGGAACTGGGCAGACGCTGTTGCTGCAGGTTCTCTGCTCTGA
TCAGGGCAATGGGAGGAAGAAGTCACCCCCAGCCTGCAGGAACCAGGTGGAGGCTGAAGTCATTGTCCACTCT
GACTTTAGTGCATCTAACGGGAACCCTGACCTCCATCTCCAAGACCTGGAGCCTGAGGACCCCCTGCCTCCAG
AGGCTCCTGATCTCATCTCGGGTGTTGGGGATCCAGGGCAGGGGGCAGCCTGGCTGGACAGGGAGTTGGGAGG
GTGTGAGCTGGCAGCCCCCGGGCCAGACAGACTTACCTGCTTGCCAGAGGCAGCCAGTGCTTCCTGCTCCTAC
CCGGACCTCCAGCCAGGCGAGGTGCTAGAGGAGACCCCTGGAGATAGCTGCCAGCTCAAATCCCCCTGCCCTC
TAGGAGCCAGCCCAGGCCTGCCCAGATCCCCGGTCTCCTCCTCT

| | | | |
|---|---|---|---|
| NOV11b, CG55379-01 | | | |
| Protein Sequence | SEQ ID NO: 136 | 1247 aa | MW at 133821.8kD |

MARGDAGRGRGLLALTFCLLAARGELLLPQETTVELSCGVGPLQVILGPEQAAVLNCSLGAAAAGPPTRVTWS
KDGDTLLEHDHLHLLANGSLWLSQPLAPNGSDESVPEAVGVIEGNYSCLAHGPPRVLASQTAVVKLASLADFS
LHPESQTVEENGTARFECHIEGLPAPIITWEKDQVTLPEEPRLIVLPNGVLQILDVQESDAGPYRCVATNSAR
QHFSQEALLSVAHRGSLASTRGQDVVIVAAPENTTVVSGQSVVMECVASADPTPFVSWVRDGKPISTDVIVLG
RTNLLIANAQPWHSGVYVCRANKPRTRDFATAAAELRVLLAAPAITQAPEALSRTRASTARFVCRASGEPRPA
LRWLHNGAPLRPNGRVKVQGGGGSLVITQIGLQDAGYYQCVAENSAGMACAAASLAVVVREGLPSAPTRVTAT
PLSSSAVLVAWERPEMHSEQIIGFSLHYQKARGMDNVEYQFAVNNDTTELQVRDLEPNTDYEFYVVAYSQLGA
SRTSTPALVHTLDDVPSAAPQLSLSSPNPSDIRVAWLPLPPSLSNGQVVKYKIEYGLGKEDQIFSTEVRGNET
QLMLNSLQPNKVYRVRISAGTAAGFGAPSQWMHHRTPSMHNQSHVPFAPAELKVQAKMESLVVSWQPPPHPTQ
ISGYKLYWREVGAEEEANGDRLPGGRGDQAWDVGPVRLKKKVKQYELTQLVPGRLYEVKLVAFNKHEDGYAAV
WKGKTEKAPAPDMPIQRGPPLPPAHVHAESNSSTSIWLRWKKPDFTTVKIVNYTVRFSPWGLRNASLVTYYSS
GEDILIGGLKPFTKYEFAVQSHGVDMDGPFGSVVERSTLPDRPSTPPSDLRLSPLTPSTVRLHWCPPTEPNGE
IVEYLILYSSNHTQPEHQWTLLTTQGEGNIFSAEVHGLESDTRYFFKMGARTEVGPGPFSRLQDVITLQEKLS
DSLDMHSVTGIIVGVCLGLLCLLACMCAGLRRSPHRESLPGLSSTATPGNPALYSRARLGPPSPPAAHELESL
VHPHPQDWSPPPSDVEDRAEVHSLMGGGVSEGRSHSKRKVSAQPSGLSWAGSWAGCELPQAGPRPALTRALLP
PAGTGQTLLLQVLCSDQGNGRKKSPPACRNQVEAEVIVHSDFSASNGNPDLHLQDLEPEDPLPPEAPDLISGV
GDPGQGAAWLDRELGGCELAAPGPDRLTCLPEAASASCSYPDLQPGEVLEETPGDSCQLKSPCPLGASPGLPR
SPVSSS

| | | |
|---|---|---|
| NOV11c, 258065951 | SEQ ID NO: 137 | 1609 bp |
| DNA Sequence | ORF Start: at 1 | ORF Stop: at 1609 |

GGTACCGCGTCGCTGGCCGTGGTGGTGCGCGAGGGGCTGCCCAGCGCCCCCACGCGGGTCACTGCTACGCCAC
TGAGCAGCTCCGCTGTGTTGGTGGCCTGGGAGCGGCCCGAGATGCACAGCGAGCAGATCATCGGCTTCTCTCT
CCACTACCAGAAGGCACGGGGCATGGACAATGTGGAATACCAGTTTGCAGTGAACAACGACACCACAGAACTA
CAGGTTCGGGACCTGGAACCCAACACAGATTATGAGTTCTACGTGGTGGCCTACTCCCAGCTGGGAGCCAGCC
GCACCTCCACCCCAGCACTGGTGCACACACTGGATGATGTCCCCAGTGCAGCACCCCAGCTCTCCCTGTCCAG
CCCCAACCCTTCGGACATCAGGGTGGCGTGGCTGCCCCTGCCCCCCAGCCTGAGCAATGGGCAGGTGGTGAAG
TACAAGATAGAATACGGTTTGGGAAAGGAAGATCAGATTTTCTCTACTGAGGTGCGAGGAAATGAGACACAGC
TTATGCTGAACTCGCTTCAGCCAAACAAGGTGTATCGAGTACGGATTTCGGCTGGTACAGCAGCCGGCTTCGG
GGCCCCCTCCCAGTGGATGCATCACAGGACGCCCAGTATGCACAACCAGAGCCATGTCCCTTTTGCCCCTGCA
GAGTTGAAGGTGCAGGCAAAGATGGAGTCCCTGGTCGTGTCATGGCAGCCACCCCCTCACCCCACCCAGATCT
CTGGCTACAAACTATATTGGCGGGAGGTGGGGGCTGAGGAGGAGGCCAATGGCGATCGCCTGCCAGGGGGCCG
TGGAGACCAGGCTTGGGATGTGGGGCCTCTCCGGCTCAAGAAGAAAGTGAAGCAGTATGAGCTGACCCAGCTA
GTCCCTGGCCGGCTGTACGAGGTGAAGCTCGTGGCTTTCAACAAACATGAGGATGGCTATGCAGCAGTGTGGA
AGGGCAAGACGGAGAAGGCGCCGGCACCAGACATGCCTATCCAGAGGGGACCACCCCTGCCTCCAGCCCACGT
CCATGCGGAATCAAACAGCTCCACATCCATCTGGCTTCGGTGGAAAAAGCCAGATTTCACCACAGTCAAGATT
GTCAACTACACTGTGCGCTTCAGCCCCTGGGGGCTCAGGAATGCCTCCCTGGTCACCTATTACACCAGTTCTG
GAGAAGACATCCTCATTGGCGGCTTGAAGCCATTCACCAAATACGAGTTTGCAGTGCAGTCTCACGGCGTGGA
CATGGATGGGCCTTTCGGCTCTGTGGTGGAGCGCTCCACCCTGCCTGACCGGCCCTCCACACCCCCATCCGAC
CTGCGACTGAGCCCCCTGACACCGTCCACGGTTCGGCTGCACTGCTGCCCCCCCACAGAGCCCAACGGGGAGA
TCGTGGAGTATCTGATCCTGTACAGCAGCAACCACACGCAGCCTGAGCACCAGTGGACCTTGCTCACCACGCA
GGGAAACATCTTCAGTGCTGAGGTCCATGGCCTGGAGAGCGACACTCGGTACTTCTTCAAGATGGGGGCGCGC
ACAGAGGTGGGACCTGGGCCTTTCTCCCGCCTGCAGGATGTGATCACGCTCCAGGAGAAGCTGTCAGACTCGG
TCG

| | | | |
|---|---|---|---|
| NOV11c, 258065951 | | | |
| Protein Sequence | SEQ ID NO: 138 | 536 aa | MW at 59532.7kD |

GTASLAVVVREGLPSAPTRVTATPLSSSAVLVAWERPEMHSEQIIGFSLHYQKARGMDNVEYQFAVNNDTTEL
QVRDLEPNTDYEFYVVAYSQLGASRTSTPALVHTLDDVPSAAPQLSLSSPNPSDIRVAWLPLPPSLSNGQVVK
YKIEYGLGKEDQIFSTEVRGNETQLMLNSLQPNKVYRVRISAGTAAGFGAPSQWMHHRTPSMHNQSHVPFAPA
ELKVQAKMESLVVSWQPPPHPTQISGYKLYWREVGAEEEANGDRLPGGRGDQAWDVGPVRLKKKVKQYELTQL
VPGRLYEVKLVAFNKHEDGYAAVWKGKTEKAPAPDMPIQRGPPLPPAHVHAESNSSTSIWLRWKKPDFTTVKI
VNYTVRFSPWGLRNASLVTYYTSSGEDILIGGLKPFTKYEFAVQSHGVDMDGPFGSVVERSTLPDRPSTPPSD
LRLSPLTPSTVRLHWCPPTEPNGEIVEYLILYSSNHTQPEHQWTLLTTQGNIFSAEVHGLESDTRYFFKMGAR
TEVGPGPFSRLQDVITLQEKLSDSV

| | | |
|---|---|---|
| Nov11d, 209886264 | SEQ ID NO: 139 | 1611 bp |
| DNA Sequence | ORF Start: at 1 | ORF Stop: end of sequence |

GGTACCGCGTCGCTGGCCGTGGTGGTGCGCGAGGGGCTGCCCAGCGCCCCCACGCGGGTCACTGCTACGCCAC
TGAGCAGCTCCGCTGTGTTGGTGGCCTGGGAGCGGCCCGAGATGCCCAGCGAGCAGATCATCGGCTTCTCTCT
CCACTACCAGAAGGCACGGCGCATGGACAATGTGGAATACCAGTTTGCAGTGAACAACGACACCACAGAACTA
CAGGTTCGGGACCTGGAACCCAACACAGATTATGAGTTCTACGTGGTGGCCTACTCCCAGCTGGGAGCCAGCC
GCACCTCCACCCCAGCACTGGTGCACACACTGGATGATGTCCCCAGTGCAGCACCCCAGCTCTCCCTGTCCAG
CCCCAACCCTTCGGACATCAGGGTGGCGTGGCTGCCCCTGCCCCCCAGCCTGAGCAATGGGCAGGTGGTGAAG
TACAAGATAGAATACGGTTTGGGAAAGGAAGATCAGATTTTCTCTACTGAGGTGCGAGGAAATGAGACACAGC
TTATGTTGAACTCGCTTCAGCCAAACAAGGTGTATCGAGTACCGATTTCGGCTGGTACAGCAGCCGGCTTCGG
GGCCCCCTCCCAGTGGATGCATCACAGGACGCCCAGTATGCACAACCAGAGCCATGTCCCTTTTGCCCCTGCA
GAGTTGAAGGTGCAGGCAAAGATGGAGTCCCTGGTCGTATCATGGCAGCCACCCCCTCACCCCACCCAGATCT
CTGGCTACAAACTATATTGGCGGCAGGTGGGGGCTGAGGAGGAGGCCAATGGCGATCGCCTGCCAGGGGGCCG
TGGAGACCAGGCTTGGGATGTGGGGCCTGTCCGGCTCAAGAAGAAAGTGAAGCAGTATGAGCTGACCCAGCTA
GTCCCTGGCCGGCTGTACGAGGTGAAGCTCGTGGCTTTCAACAAACATGAGGATGGCTATGCAGCAGTGTGGA
AGGGCAAGACGGAGAAGGCGCCGGCACCAGACATGCCTATCCAGAGGGGACCACCCCTGCCTCCAGCCCACGT
CCATGCGGAATCAAACAGCTCCACATCCATCTGGCTTCGGTGGAAAAAGCCAGATTTCACCACAGTCAAGATT
GTCAACTACACTGTGCGCTTCAGCCCCTGGGGGCTCAGGAATGCCTCCCTGGTCACCTATTACACCAGTTCTG
GAGAAGACATCCTCATTGGCGGCTTGAAGCCATTCACCAAATACGAGTTTGCAGTGCAGTCTCACGGCGTGGA
CATGGATGGGCCTTTCGGCTCTGTGGTGGAGCGCTCCACCCTGCCTGACCGGCCCTCCACACCCCCATCCGAC
CTGCGACTGAGCCCCCTGACGCCGTCCACGGTTCGGCTGCACTGGTGCCCCCCCACAGAGCCCAACGGGGAGA
TCGTGGAGTATCTGATCCTGTACAGCAGCAACCACACGCAGCCTGAGCACCAGTGGACCTTGCTCACCACGCA
GGGAAACATCTTCAGTGCTGAGGTCCATGGCCTGGAGAGCGACACTCGGTACTTCTTCAAGATGGGGGCGCGC
ACAGAGGTGGGACCTGGGCCTTTCTCCCGCCTGCAGGATGTGATCACGCTCCAGGAGAAGCTGTCAGACTCGG
TCGAC

| | | | |
|---|---|---|---|
| NOV11d, 209886264 | | | |
| Protein Sequence | SEQ ID NO: 140 | 537 aa | MW at 59607.7kD |

GTASLAVVVREGLPSAPTRVTATPLSSSAVLVAWERPEMPSEQIIGFSLHYQKARGMDNVEYQFAVNNDTTEL
QVRDLEPNTDYEFYVVAYSQLGASRTSTPALVHTLDDVPSAAPQLSLSSPNPSDIRVAWLPLPPSLSNGQVVK
YKIEYGLGKEDQIFSTEVRGNETQLMLNSLQPNKVYRVRISAGTAAGFGAPSQWMHHRTPSMHNQSHVPFAPA
ELKVQAKMESLVVSWQPPPHPTQISGYKLYWREVGAEEEANGDRLPGGRGDQAWDVGPVRLKKKVKQYELTQL
VPGRLYEVKLVAFNKHEDGYAAVWKGKTEKAPAPDMPIQRGPPLPPAHVHAESNSSTSIWLRWKKPDFTTVKI
VNYTVRFSPWGLRNASLVTYYTSSGEDILIGGLKPFTKYEFAVQSHGVDMDGPFGSVVERSTLPDRPSTPPSD
LRLSPLTPSTVRLHWCPPTEPNGEIVEYLILYSSNHTQPEHQWTLLTTQGNIFSAEVHGLESDTRYFFKMGAR
TEVGPGPFSRLQDVITLQEKLSDSVD

| | | |
|---|---|---|
| NOV11e, 209886345 | SEQ ID NO: 141 | 1672 bp |
| DNA Sequence | ORF Start: at 1 | ORF Stop: at 1672 |

GGTACCGCGTCGCTGGCCGTGGTGGTGCGCGAGGGGCTGCCCAGCGCCCCCACGCGGGTCACTGCTACGCCAC
TGAGCAGCTCCGCTGTGTTGGTGGCCTGGGAGCGGCCCGAGATGCCCAGCGAGCAGATCATCGGCTTCTCTCT
CCACTACCAGAAGGCACGGGGCATGGACAATGTGGAATACCAGTTTGCAGTGAACAACGACACCACAGAACTA
CAGGTTCGGGACCTGGAACCCAACACAGATTATGAGTTCTACGTGGTGGCCTACTCCCAGCTGGGAGCCAGCC
GCACCTCCACCCCAGCACTGGTGCACACACTGGATGATGTCCCCAGTGCAGCACCCCAGCTCTCCCTGTCCAG
CCCCAACCCTTCGGACATCAGGGTGGCGTGGCTGCCCCTGCCCCCCAGCCTGAGCAATGGGCAGGTGCTGAAG
TACAAGATAGAATACGGTTTGGGAAAGGAAGATCAGATTTTCTCTACTGAGGTGCGAGGAAATGAGACACAGC
TTATGTTGAACTCGCTTCAGCCAAACAAGGTGTATCGAGTACGGATTTCGGCTGGTACAGCAGCCGGCTTCGG
GGCCCCCTCCCAGTGGATGCATCACAGGACGCCCAGTATGCACAACCAGAGCCATGTCCCTTTTGCCCCTGCA
GAGTTGAAGGTGCAGGCAAGGATGGAGTCCCTGGTCGTGTCATGGCAGCCACCCCCTCACCCCACCCAGATCT
CTGGCTACAAACTATATTGGCGGGAGGTGGGGGCTGAGGAGGAGGCCAATGGCGATCGCCTGCCAGGGGGCCG
TGGAGACCAGGCTTGGGATGTGGGGCCTGTCCGGCTCAAGAAGAAAGTGAAGCAGTATGAGCTGACCCAGCTA
GTCCCTGGCCGGCTGTACGAGGTGAAGCTCGTGGCTTTCAACAAACATGAGGATGGCTATGCAGCAGTGTGGA
AGGGCAAGACGGAGAACGCGCCGGCACCAGACATGCCTATCCAGAGGGGACCACCCCTGCCTCCAGCCCACGT
CCATGCGGAATCAAACAGCTCCACATCCATCTGGCTTCGGTGGAAAAAGCCAGATTTCACCACAGTCAAGATT
GTCAACTACACTGTGCGCTTCAGCCCCTGGGGGCTCAGGAATGCCTCCCTGGTCACCTATTACACCAGTTCTG
GAGAAGACATCCTCATTGGCGGCTTGAAGCCATTCACCAAATACGAGTTTGCAGTGCAGTCTCACGGCGTGGA
CATGGATGGGCCTTTCGGCTCTGTGGTGGAGCGCTCCACCCTGCCTGACCGGCCCTCCACACCCCCATCCGAC
CTGCGACTGAGCCCCCTGACGCCGTCCACGGTTCGGCTGCACTGGTGCCCCCCCACAGAGCCCAACGGGGAGA
TCGTGGAGTATCTGATCCTGTACAGCAGCAACCACACGCAGCCTGAGCACCAGTGGACCTTGCTCACCACGCA
GGGAAACATCTTCAGTGCTGAGGTCCATGGCCTGGAGAGCGACACTCGGTACTTCTTCAAGATGGGGGCGCGC
ACAGAGGTGGGACCTGGGCCTTTCTCCCGCCTGCAGGATGTGATCACGCTCCAGGAGAAGCTGTCAGACTCGG
TCGACAGCTTCTCCTGGAGCGTGATCACAGCCCCTCGCGCACCACCACGGCCAGCGACGCGGTACC

| | | | |
|---|---|---|---|
| NOV11e, 209886345 | | | |
| Protein Sequence | SEQ ID NO: 142 | 557 aa | MW at 61878.3kD |

GTASLAVVVREGLPSAPTRVTATPLSSSAVLVAWERPEMPSEQIIGFSLHYQKARGMDNVEYQFAVNNDTTEL
QVRDLEPNTDYEFYVVAYSQLGASRTSTPALVHTLDDVPSAAPQLSLSSPNPSDIRVAWLPLPPSLSNGQVVK
YKIEYGLGKEDQIFSTEVRGNETQLMLNSLQPNKVYRVRISAGTAAGFGAPSQWMHHRTPSMHNQSHVPFAPA
ELKVQARMESLVVSWQPPPHPTQISGYKLYWREVCAEEEANGDRLPGGRGDQAWDVCPVRLKKKVKQYELTQL
VPGRLYEVKLVAFHKHEDGYAAVWKGKTEKAPAPDMPIQRGPPLPPAHVHAESNSSTSIWLRWKKPDFTTVKI
VNYTVRFSPWGLRNASLVTYYTSSGEDILIGGLKPFTKYEFAVQSHGVDMDGPFGSVVERSTLPDRPSTPPSD
LRLSPLTPSTVRLHWCPPTEPNGEIVEYLILYSSNHTQPEHQWTLLTTQGNIFSAEVHGLESDTRYFFKMGAR
TEVGPGPFSRLQDVITLQEKLSDSVDSFSWSVITAPRAPPRPATRY

| | | |
|---|---|---|
| NOV11f, 209886357 | SEQ ID NO: 143 | 1611 bp |
| DNA Sequence | ORF Start: at 1 | ORF Stop: end of sequence |

GGTACCGCGTCGCTGGCCGTGGTGGTGCGCGAGGGGCTGCCCAGCGCCCCCACGCGGGTCACTGCTACGCCAC
TGAGCAGCTCCGCTGTGTTGGTGGCCTGGGAGCGGCCCGAGATGCCCAGCGAGCAGATCATCGGCTTCTCTCT
CCACTACCAGAAGGCACGGGGCATGGACAATGTGGAATACCAGTTTGCAGTGAACAACGACACCACAGAACTA
CAGGTTCGGGACCTGGAACCCAACACAGATTATGAGTTCTACGTGGTGGCCTACTCCCAGCTGGGAGCCAGCC
GCACCTCCACCCCAGCACTGGTGCACACACTGGATGATGTCCCCAGTGCAGCACCCCAGCTCTCCCTGTCCAG
CCCCAACCCTTCGGACATCAGGGTGGCGTGGCTGCCCCTGCCCCCCAGCCTGAGCAATGGGCAGGTGGTGAAG
TACAAGATAGAATACGGTTTGGGAAAGGAAGATCAGATTTTCTCTACTGAGGTGCGAGGAAATGAGACACAGC
TTATGTTGAACTCGCTTCAGCCAAACAAGGTGTATCGAGTACGGATTTCGGCTGGTACAGCAGCCGGCTTCGG
GGCCCCCTCCCAGTGGATGCATCACAGGACGCCCAGTATGCACAACCAGAGCCATGTCCCTTTTGCCCCTGCA
GAGTTGAAGGTGCAGGCAAAGATGGAGTCCCTGGTCGTGTCATGGCAGCCACCCCCTCACCCCACCCAGATCT
CTGGCTACAAACTATATTGGCGGGAGGTGGGGGCTGAGGAGGAGGCCAATGGCGATCGCCTGCCAGGGGGCCG
TGGAGACCAGGCTTGGGATGTGGGGCCTGTCCGGCTCAAGAAGAAAGTGAAGCAGTATGAGCTGACCCAGCTA
GTCCCTGGCCGGCTGTACGAGGTGAAGCTCGTGGCTTTCAACAAACATGAGGATGGCTATGCAGCAGTGTGGA
AGGGCAACACGGAGAAGGCGCCGGCACCAGACATGCCTATCCAGAGGGGACCACCCCTGCCTCCAGCCCACGT
CCATGCGGAATCAAACAGCTCCACATCCATCTGGCTTCGGTGGAAAAAGCCAGATTTCACCACAGTCAAGATT
GTCAACTACACTGTGCGCTTCAGCCCCTGGGGGCTCAGGAATGCCTCCCTGGTCACCTATTACACCAGTTCTG
GAGAAGACATCCTCATTGGCGGCTTGAAGCCATTCACCAAATACGAGTTTGCAGTGCAGTCTCACGGCGTGGA
CATGGATGGGCCTTTCGGCTCTGTGGTGGAGCGCTCCACCCTGCCTGACCGGCCCTCCACACCCCCATCCGAC
CTGCGACTGAGCCCCCTGACGCCGTCCACGGTTCGGCTGCACTGGTGCCCCCCCACAGAGCCCAACGGGGAGA
TCGTGGAGTATCTGATCCTGTACAGCAGCAACCACACGCAGCCTGAGCACCAGTGGACCTTGCTCACCACGCA
GGGAAACATCTTCAGTGCTGAGGTCCATGGCCTGGAGAGCGACACTCGGTACTTCTTCAAGATGGGGGCGCGC
ACAGAGGTGGGACCTGGGCCTTTCTCCCGCCTGCAGGATGTGATCACGCTCCAGGAGAAGCTGTCAGACTCGG
TCGAC

| | | | |
|---|---|---|---|
| NOV11f, 209886357 | | | |
| Protein Sequence | SEQ ID NO: 144 | 537 aa | MW at 59607.7kD |

GTASLAVVVREGLPSAPTRVTATPLSSSAVLVAWERPEMPSEQIIGFSLHYQKARGMDNVEYQFAVNNDTTEL
QVRDLEPNTDYEFYVVAYSQLGASRTSTPALVHTLDDVPSAAPQLSLSSPNPSDIRVAWLPLPPSLSNGQVVK
YKIEYGLGKEDQIFSTEVRGNETQLMLNSLQPNKVYRVRISAGTAAGFGAPSQWMHHRTPSMHNQSHVPFAPA
ELKVQAKMESLVVSWQPPPHPTQISGYKLYWREVGAEEEANGDRLPGGRGDQAWDVGPVRLKKKVKQYELTQL
VPGRLYEVKLVAFNKHEDGYAAVWKGKTEKAPAPDMPIQRGPPLPPAHVHAESNSSTSIWLRWKKPDFTTVKI
VNYTVRFSPWGLRNASLVTYYTSSGEDILIGGLKPFTKYEFAVQSHGVDMDGPFGSVVERSTLPDRPSTPPSD
LRLSPLTPSTVRLHWCPPTEPNGEIVEYLILYSSNHTQPEHQWTLLTTQGNIFSAEVHGLESDTRYFFKMGAR
TEVGPGPFSRLQDVITLQEKLSDSVD

| | | |
|---|---|---|
| NOV11g, CG55379-02 | SEQ ID NO: 145 | 1611 bp |
| DNA Sequence | ORF Start: at 7 | ORF Stop: at 1606 |

GGTACCGCGTCGCTGGCCGTGGTGGTGCGCGAGGGGCTGCCCAGCGCCCCCACGCGGGTCACTGCTACGCCAC
TGAGCAGCTCCGCTGTGTTGGTGGCCTGGGAGCGGCCCGAGATGCCCAGCGAGCAGATCATCGGCTTCTCTCT
CCACTACCAGAAGGCACGCGGCATGGACAATGTGGAATACCAGTTTGCAGTGAACAACGACACCACAGAACTA
CAGGTTCGGGACCTGGAACCCAACACAGATTATGAGTTCTACGTGGTGGCCTACTCCCAGCTGGGAGCCAGCC
GCACCTCCACCCCAGCACTGGTGCACACACTGGATGATGTCCCCAGTGCAGCACCCCAGCTCTCCCTGTCCAG
CCCCAACCCTTCGGACATCAGGGTGGCGTGGCTGCCCCTGCCCCCCAGCCTGAGCAATGGGCAGGTGGTGAAG
TACAAGATAGAATACGGTTTGGGAAAGGAAGATCAGATTTTCTCTACTGAGGTGCGAGGAAATGAGACACAGC
TTATGTTGAACTCGCTTCAGCCAAACAAGGTGTATCGAGTACGGATTTCGGCTGGTACAGCAGCCGGCTTCGG
GGCCCCCTCCCAGTGGATGCATCACAGGACGCCCAGTATGCACAACCAGAGCCATGTCCCTTTTGCCCCTGCA
GAGTTGAAGGTGCAGGCAAAGATGGAGTCCCTGGTCGTATCATGGCAGCCACCCCCTCACCCCACCCAGATCT
CTGGCTACAAACTATATTGGCGGGAGGTGGGGGCTGAGGAGGAGGCCAATGGCGATCGCCTGCCAGGGGGCCG
TGGAGACCAGGCTTGGGATGTGGGGCCTGTCCGGCTCAAGAAGAAAGTGAAGCAGTATGAGCTGACCCAGCTA
GTCCCTGGCCGGCTGTACGAGGTGAAGCTCGTGGCTTTCAACAAACATGAGGATGGCTATGCAGCAGTGTGGA
AGGGCAAGACGGAGAAGGCGCCGGCACCAGACATGCCTATCCAGAGGGGACCACCCCTGCCTCCAGCCCACGT
CCATGCGGAATCAAACAGCTCCACATCCATCTGGCTTCGGTGGAAAAAGCCAGATTTCACCACAGTCAAGATT
GTCAACTACACTGTGCGCTTCAGCCCCTGGGGGCTCAGGAATGCCTCCCTGGTCACCTATTACACCAGTTCTG
GAGAAGACATCCTCATTGGCGGCTTGAAGCCATTCACCAAATACGAGTTTGCAGTGCAGTCTCACGGCGTGGA
CATGGATGGGCCTTTCGGCTCTGTGGTGGAGCGCTCCACCCTGCCTGACCGGCCCTCCACACCCCCATCCGAC
CTGCGACTGAGCCCCCTGACGCCGTCCACGGTTCGGCTGCACTGGTCCCCCCCCACAGAGCCCAACGGGGAGA
TCGTGGAGTATCTGATCCTGTACACCAGCAACCACACGCAGCCTGAGCACCAGTGGACCTTGCTCACCACGCA
GGGAAACATCTTCAGTGCTGAGGTCCATGGCCTGGAGAGCGACACTCGGTACTTCTTCAAGATGGGGGCGCGC
ACAGAGGTGGGACCTGGGCCTTTCTCCCGCCTGCAGGATGTGATCACGCTCCAGGAGAAGCTGTCAGACTCGG
TCGAC

| | | | |
|---|---|---|---|
| NOV11g, CG55379-02 | | | |
| Protein Sequence | SEQ ID NO: 146 | 533 aa | MW at 59235.4kD |

ASLAVVVREGLPSAPTRVTATPLSSSAVLVAWERPEMPSEQIIGFSLHYQKARGMDNVEYQFAVNNDTTELQV
RDLEPNTDYEFYVVAYSQLGASRTSTPALVHTLDDVPSAAPQLSLSSPNPSDIRVAWLPLPPSLSNGQVVKYK
IEYGLGKEDQIFSTEVRGNETQLMLNSLQPNKVYRVRISAGTAAGFGAPSQWMHHRTPSMHNQSHVPFAPAEL
KVQAKMESLVVSWQPPPHPTQISGYKLYWREVGAEEEANGDRLPGGRGDQAWDVGPVRLKKKVKQYELTQLVP
GRLYEVKLVAFNKHEDGYAAVWKGKTEKAPAPDMPIQRGPPLPPAHVHAESNSSTSIWLRWKKPDFTTVKIVN
YTVRFSPWGLRNASLVTYYTSSGEDILIGGLKPFTKYEFAVQSHGVDMDGPFGSVVERSTLPDRPSTPPSDLR
LSPLTPSTVRLHWCPPTEPNGEIVEYLILYSSNHTQPEHQWTLLTTQGNIFSAEVHGLESDTRYFFKMGARTE
VGPGPFSRLQDVITLQEKLSDS

| | | |
|---|---|---|
| NOV11h, CG55379-03 | SEQ ID NO: 147 | 1672 bp |
| DNA Sequence | ORF Start: at 7 | ORF Stop: at 1606 |

GGTACCGCGTCGCTGGCCGTGGTGGTGCGCGAGGGGCTGCCCAGCGCCCCCACGCGGGTCACTGCTACGCCAC
TGAGCAGCTCCGCTGTGTTGGTGGCCTGGGAGCGGCCCGAGATGCCCAGCGAGCAGATCATCGGCTTCTCTCT
CCACTACCAGAGGCACGGGGCATGGACAATGTGGAATACCAGTTTGCAGTGAACAACGACACCACAGAACTA
CAGGTTCGGGACCTGGAACCCAACACAGATTATGAGTTCTACGTGGTGGCCTACTCCCAGCTGGGAGCCAGCC
GCACCTCCACCCCAGCACTGGTGCACACACTGGATGATGTCCCCAGTGCAGCACCCCAGCTCTCCCTGTCCAG
CCCCAACCCTTCGGACATCAGGGTGGCGTGGCTGCCCCTGCCCCCCAGCCTGAGCAATGGGCAGGTGGTGAAG
TACAAGATAGAATACGGTTTGGGAAAGGAAGATCAGATTTTCTCTACTGAGGTGCGAGGAAATGAGACACAGC
TTATGTTGAACTCGCTTCAGCCAAACAAGGTGTATCGAGTACGGATTTCGGCTGGTACAGCAGCCGGCTTCGG
GGCCCCCTCCCAGTGGATGCATCACAGGACGCCCAGTATGCACAACCACAGCCATGTCCCTTTTGCCCCTGCA
GAGTTGAAGGTGCAGGCAAGGATGGAGTCCCTGGTCGTGTCATGGCAGCCACCCCCTCACCCCACCCAGATCT
CTGGCTACAAACTATATTGGCGGGAGGTGGGGGCTGAGGAGGAGGCCAATGGCGATCGCCTGCCAGGGGGCCG
TGGAGACCAGGCTTGGGATGTGGGGCCTGTCCGGCTCAAGAAGAAAGTGAAGCAGTATGAGCTGACCCAGCTA
GTCCCTGGCCGGCTGTACGAGGTGAAGCTCGTGGCTTTCAACAAACATGAGGATGGCTATGCAGCAGTGTGGA
AGGGCAAGACGCAGAAGGCGCCGGCACCAGACATGCCTATCCAGAGGGGACCACCCCTGCCTCCAGCCCACGT
CCATGCGGAATCAAACAGCTCCACATCCATCTGGCTTCCGTGGAAAAAGCCAGATTTCACCACAGTCAAGATT
GTCAACTACACTGTGCGCTTCAGCCCCTGGGGGCTCAGGAATGCCTCCCTGGTCACCTATTACACCAGTTCTG
GAGAAGACATCCTCATTGGCGGCTTGAAGCCATTCACCAAATACGAGTTTGCAGTGCAGTCTCACGGCGTGGA
CATGGATGGGCCTTTCGGCTCTGTGGTGGAGCGCTCCACCCTGCCTGACCGGCCCTCCACACCCCCATCCGAC
CTGCGACTGACCCCCCTGACGCCGTCCACGGTTCGGCTGCACTGGTGCCCCCCCACAGAGCCCAACGGGGAGA
TCGTGGAGTATCTGATCCTGTACAGCAGCAACCACACGCAGCCTGAGCACCAGTGGACCTTGCTCACCACGCA
GGGAAACATCTTCAGTGCTGAGGTCCATGGCCTGGAGAGCGACACTCGGTACTTCTTCAAGATGGGGGCGCGC
ACAGAGGTGGGACCTGGGCCTTTCTCCCGCCTGCAGGATGTGATCACGCTCCAGGAGAAGCTGTCAGACTCGG
TCGACAGCTTCTCCTGGAGCGTGATCACAGCCCCTCGCGCACCACCACGGCCAGCGACGCGGTACC

| | | | |
|---|---|---|---|
| NOV11h, CG55379-03 | | | |
| Protein Sequence | SEQ ID NO: 148 | 533 aa | MW at 59263.4kD |

ASLAVVVREGLPSAPTRVTATPLSSSAVLVAWERPEMPSEQIIGFSLHYQKARGMDNVEYQFAVNNDTTELQV
RDLEPNTDYEFYVVAYSQLGASRTSTPALVHTLDDVPSAAPQLSLSSPNPSDIRVAWLPLPPSLSNGQVVKYK
IEYGLGKEDQIFSTEVRGNETQLMLNSLQPNKVYRVRISAGTAAGFGAPSQWMHHRTPSMHNQSHVPFAPAEL
KVQARMESLVVSWQPPPHPTQISGYKLYWREVGAEEEANGDRLPGGRGDQAWDVGPVRLKKKVKQYELTQLVP
GRLYEVKLVAFNKHEDGYAAVWKGKTEKAPAPDMPIQRGPPLPPAHVHAESNSSTSIWLRWKKPDFTTVKIVN
YTVRFSPWGLRNASLVTYYTSSGEDILIGGLKPFTKYEFAVQSHGVDMDGPFGSVVERSTLPDRPSTPPSDLR
LSPLTPSTVRLHWCPPTEPNGEIVEYLILYSSNHTQPEHQWTLLTTQGNIFSAEVHGLESDTRYFFKMGARTE
VGPGPFSRLQDVITLQEKLSDS

[0417] A ClustalW comparison of the above protein sequences yields the following sequence alignment shown in Table 11B.

TABLE 11B
Comparison of the NOV11 protein sequences.

| | |
|---|---|
| NOV11a | MARGDAGRGRGLLALTFCLLAARGELLLPQETTVELSCGVGPLQVILGPEQAAVLNCSLG |
| NOV11b | MARGDAGRGRGLLALTFCLLAARGELLLPQETTVELSCGVGPLQVILGPEQAAVLNCSLG |
| NOV11c | ------------------------------------------------------------ |
| NOV11d | ------------------------------------------------------------ |
| NOV11e | ------------------------------------------------------------ |
| NOV11f | ------------------------------------------------------------ |
| NOV11g | ------------------------------------------------------------ |
| NOV11h | ------------------------------------------------------------ |
| NOV11a | AAAAGPPTRVTWSKDGDTLLEHDHLHLLPNGSLWLSQPLAPNGSDESVPEAVGVIEGNYS |
| NOV11b | AAAAGPPTRVTWSKDGDTLLEHDHLHLLANGSLWLSQPLAPNGSDESVPEAVGVIEGNYS |
| NOV11c | ------------------------------------------------------------ |
| NOV11d | ------------------------------------------------------------ |
| NOV11e | ------------------------------------------------------------ |
| NOV11f | ------------------------------------------------------------ |
| NOV11g | ------------------------------------------------------------ |
| NOV11h | ------------------------------------------------------------ |
| NOV11a | CLAHGPLGVLASQTAVVKLASLADFSLHPESQTVEENGTARFECHIEGLPAPIITWEKDQ |
| NOV11b | CLAHGPPRVLASQTAVVKLASLADFSLHPESQTVEENGTARFECHIEGLPAPIITWEKDQ |
| NOV11c | ------------------------------------------------------------ |
| NOV11d | ------------------------------------------------------------ |
| NOV11e | ------------------------------------------------------------ |
| NOV11f | ------------------------------------------------------------ |
| NOV11g | ------------------------------------------------------------ |
| NOV11h | ------------------------------------------------------------ |
| NOV11a | VTLPEEPRLIVLPNGVLQILDVQESDAGPYRCVATNSARQHFSQEALLSVAHRGSLASTR |
| NOV11b | VTLPEEPRLIVLPNGVLQILDVQESDAGPYRCVATNSARQHFSQEALLSVAHRGSLASTR |
| NOV11c | ------------------------------------------------------------ |
| NOV11d | ------------------------------------------------------------ |
| NOV11e | ------------------------------------------------------------ |
| NOV11f | ------------------------------------------------------------ |
| NOV11g | ------------------------------------------------------------ |
| NOV11h | ------------------------------------------------------------ |
| NOV11a | GQDVVIVAAPENTTVVSGQSVVMECVASADPTPFVSWVRDGKPISTDVIVLGRTNLLIAN |
| NOV11b | GQDVVIVAAPENTTVVSGQSVVMECVASADPTPFVSWVRDGKPISTDVIVLGRTNLLIAN |
| NOV11c | ------------------------------------------------------------ |
| NOV11d | ------------------------------------------------------------ |
| NOV11e | ------------------------------------------------------------ |
| NOV11f | ------------------------------------------------------------ |
| NOV11g | ------------------------------------------------------------ |
| NOV11h | ------------------------------------------------------------ |
| NOV11a | AQPWHSGVYVCRANKPRTRDFATAAAELRVLLAAPAITQAPEALSRTRASTARFVCRASC |
| NOV11b | AQPWHSGVYVCRANKPRTRDFATAAAELRVLLAAPAITQAPEALSRTRASTARFVCRASG |
| NOV11c | ------------------------------------------------------------ |
| NOV11d | ------------------------------------------------------------ |
| NOV11e | ------------------------------------------------------------ |
| NOV11f | ------------------------------------------------------------ |
| NOV11g | ------------------------------------------------------------ |
| NOV11h | ------------------------------------------------------------ |
| NOV11a | EPRPALRWLHNGAPLRPNGRVKVQGGGGSLVITQIGLQDAGYYQCVAENSAGMACAAASL |
| NOV11b | EPRPALRWLHNGAPLRPNGRVKVQGGGGSLVITQIGLQDAGYYQCVAENSAGMACAAASL |
| NOV11c | -------------------------------------------------------GTASL |
| NOV11d | -------------------------------------------------------GTASL |
| NOV11e | -------------------------------------------------------GTASL |
| NOV11f | -------------------------------------------------------GTASL |
| NOV11g | ---------------------------------------------------------ASL |
| NOV11h | ---------------------------------------------------------ASL |
| NOV11a | AVVVREGLPSAPTRVTATPLSSSAVLVAWERPEMHSEQIIGFSLHYQKARGMDNVEYQFA |
| NOV11b | AVVVREGLPSAPTRVTATPLSSSAVLVAWERPEMHSEQIIGFSLHYQKARGMDNVEYQFA |
| NOV11c | AVVVREGLPSAPTRVTATPLSSSAVLVAWERPEMHSEQIIGFSLHYQKARGMDNVEYQFA |
| NOV11d | AVVVREGLPSAPTRVTATPLSSSAVLVAWERPEMPSEQIIGFSLHYQKARGMDNVEYQFA |
| NOV11e | AVVVREGLPSAPTRVTATPLSSSAVLVAWERPEMPSEQIIGFSLHYQKARGMDNVEYQFA |
| NOV11f | AVVVREGLPSAPTRVTATPLSSSAVLVAWERPEMPSEQIIGFSLHYQKARGMDNVEYQFA |
| NOV11g | AVVVREGLPSAPTRVTATPLSSSAVLVAWERPEMPSEQIIGFSLHYQKARGMDNVEYQFA |
| NOV11h | AVVVREGLPSAPTRVTATPLSSSAVLVAWERPEMPSEQIIGFSLHYQKARGMDNVEYQFA |
| NOV11a | VNNDTTELQVRDLEPNTDYEFYVVAYSQLGASRTSTPALVHTLDDVPSAAPQLSLSSPNP |
| NOV11b | VNNDTTELQVRDLEPNTDYEFYVVAYSQLGASRTSTPALVHTLDDVPSAAPQLSLSSPNP |
| NOV11c | VNNDTTELQVRDLEPNTDYEFYVVAYSQLGASRTSTPALVHTLDDVPSAAPQLSLSSPNP |
| NOV11d | VNNDTTELQVRDLEPNTDYEFYVVAYSQLGASRTSTPALVHTLDDVPSAAPQLSLSSPNP |
| NOV11e | VNNDTTELQVRDLEPNTDYEFYVVAYSQLGASRTSTPALVHTLDDVPSAAPQLSLSSPNP |
| NOV11f | VNNDTTELQVRDLEPNTDYEFYVVAYSQLGASRTSTPALVHTLDDVPSAAPQLSLSSPNP |
| NOV11g | VNNDTTELQVRDLEPNTDYEFYVVAYSQLGASRTSTPALVHTLDDVPSAAPQLSLSSPNP |
| NOV11h | VNNDTTELQVRDLEPNTDYEFYVVAYSQLGASRTSTPALVHTLDDVPSAAPQLSLSSPNP |
| NOV11a | SDIRVAWLPLPPSLSNGQVVKYKIEYGLGKEGEWGDQIFSTEVRGNETQLMLNSLQPNKV |
| NOV11b | SDIRVAWLPLPPSLSNGQVVKYKIEYGLGKE----DQIFSTEVRGNETQLMLNSLQPNKV |
| NOV11c | SDIRVAWLPLPPSLSNGQVVKYKIEYGLGKE----DQIFSTEVRGNETQLMLNSLQPNKV |
| NOV11d | SDIRVAWLPLPPSLSNGQVVKYKIEYGLGKE----DQIFSTEVRGNETQLMLNSLQPNKV |
| NOV11e | SDIRVAWLPLPPSLSNGQVVKYKIEYGLGKE----DQIFSTEVRGNETQLMLNSLQPNKV |
| NOV11f | SDIRVAWLPLPPSLSNGQVVKYKIEYGLGKE----DQIFSTEVRGNETQLMLNSLQPNKV |
| NOV11g | SDIRVAWLPLPPSLSNGQVVKYKIEYGLGKE----DQIFSTEVRGNETQLMLNSLQPNKV |
| NOV11h | SDIRVAWLPLPPSLSNGQVVKYKIEYGLGKE----DQIFSTEVRGNETQLMLNSLQPNKV |
| NOV11a | YRVRISAGTAAGFGAPSQWMHHRTPSMHNQSHVPFAPAELKVQAKMESLVVSWQPPPHPT |
| NOV11b | YRVRISAGTAAGFGAPSQWMHHRTPSNHNQSHVPFAPAELKVQAKMESLVVSWQPPPHPT |
| NOV11c | YRVRISAGTAAGFGAPSQWMHHRTPSMHNQSHVPFAPAELKVQAKMESLVVSWQPPPHPT |
| NOV11d | YRVRISAGTAAGFGAPSQWMHHRTPSMHNQSHVPFAPAELKVQAKMESLVVSWQFPPHPT |
| NOV11e | YRVRISAGTAAGFGAPSQWMHHRTPSMHNQSHVPFAPAELKVQARMESLVVSWQPPPHPT |
| NOV11f | YRVRISAGTAAGFGAPSQWMHHRTPSMHNQSNVPFAPAELKVQAKMESLVVSWQPPPHPT |
| NOV11g | YRVRISAGTAAGFGAPSQWMHHRTPSMHNQSHVPFAPAELKVQAKMESLVVSWQPPPHPT |
| NOV11h | YRVRISAGTAAGFGAPSQWMHHRTPSMHNQSHVPFAPAELKVQARMESLVVSWQPPPHPT |
| NOV11a | QISGYKLYWREVGAEEEANGDRLPGGRGDQAWDVGPVRLKKKVKQYELTQLVPGRLYEVK |
| NOV11b | QISGYKLYWREVGAEEEANGDRLPGGRGDQAWDVGPVRLKKKVKQYELTQLVPGRLYEVK |
| NOV11c | QISGYKLYWREVGAEEEANGDRLPGGRGDQAWDVGPVRLKKKVKQYELTQLVPGRLYEVK |
| NOV11d | QISGYKLYWREVGAEEEANGDRLPGGRGDQAWDVGPVRLKKKVKQYELTQLVPGRLYEVK |
| NOV11e | QISGYKLYWREVGAEEEANGDRLPGGRGDQAWDVGPVRLKKKVKQYELTQLVPGRLYEVK |
| NOV11f | QISGYKLYWREVGAEEEANGDRLPGGRGDQAWDVGPVRLKKKVKQYELTQLVPGRLYEVK |
| NOV11g | QISGYKLYWREVGAEEEANGDRLPGGRGDQAWDVGPVRLKKKVKQYELTQLVPGRLYEVK |
| NOV11h | QISCYKLYWREVGAEEEANGDRLPGGRGDQAWDVGPVRLKKKVKQYELTQLVPGRLYEVK |
| NOV11a | LVAFNKHEDGYAAVWKGKTEKAPAPDMPIQRGPPLPPAHVHAESNSSTSIWLRWKKPDFT |
| NOV11b | LVAFNKHEDGYAAVWKGKTEKAPAPDMPIQRGPPLPPAHVHAESNSSTSIWLRWKKPDFT |
| NOV11c | LVAFNKHEDGYAAVWKGKTEKAPAPDMPIQRGPPLPPAHVHAESNSSTSIWLRWKKPDFT |
| NOV11d | LVAFNKHEDGYAAVWKGKTEKAPAPDMPIQRGPPLPPAHVHAESNSSTSIWLRWKKPDFT |
| NOV11e | LVAFNKHEDGYAAVWKGKTEKAPAPDMPIQRGPPLPPAHVHAESNSSTSIWLRWKKPDFT |
| NOV11f | LVAFNKHEDGYAAVWKGKTEKAPAPDMPIQRGPPLPPAHVHAESNSSTSIWLRWKKPDFT |
| NOV11g | LVAFNKHEDGYAAVWKGKTEKAPAPDMPIQRGPPLPPAHVHAESNSSTSIWLRWKKPDFT |
| NOV11h | LVAFNKHEDGYAAVWKGKTEKAPAPDMPIQRGPPLPPAHVHAESNSSTSIWLRWKKPDFT |
| NOV11a | TVKIVNYTVRFSPWGLRNASLVTYYTSSGEDILIGGLKPFTKYEFAVQSHGVDMDGPFGS |
| NOV11b | TVKIVNYTVRFSPWGLRNASLVTYYSS-GEDILIGGLKPFTKYEFAVQSHGVDMDGPFGS |
| NOV11c | TVKIVNYTVRFSPWGLRNASLVTYYTSSGEDILIGGLKPFTKYEFAVQSHGVDMDGPFGS |
| NOV11d | TVKIVNYTVRFSPWGLRNASLVTYYTSSGEDILIGGLKPFTKYEFAVQSHGVDMDGPFGS |
| NOV11e | TVKIVNYTVRFSPWGLRNASLVTYYTSSGEDILIGGLKPFTKYEFAVQSHGVDMDGPFGS |
| NOV11f | TVKIVNYTVRFSPWGLRNASLVTYYTSSGEDILIGGLKPFTKYEFAVQSHGVDMDGPFGS |
| NOV11g | TVKIVNYTVRFSPWGLRNASLVTYYTSSGEDILIGGLKPFTKYEFAVQSHGVDMDGPFGS |
| NOV11h | TVKIVNYTVRFSPWGLRNASLVTYYTSSGEDILIGGLKPFTKYEFAVQSHGVDMDGPFGS |
| NOV11a | VVERSTLPDRPSTPPSDLRLSPLTPSTVRLHWCPPTEPNGEIVEYLILYSSNHTQPEHQW |
| NOV11b | VVERSTLPDRPSTPPSDLRLSPLTPSTVRLHWCPPTEPNGEIVEYLILYSSNHTQPENQW |
| NOV11c | VVERSTLPDRPSTPPSDLRLSPLTPSTVRLHWCPPTEPNGEIVEYLILYSSNHTQPEHQW |
| NOV11d | VVERSTLPDRPSTPPSDLRLSPLTPSTVRLHWCPPTEPNGEIVEYLILYSSNHTQPEHQW |
| NOV11e | VVERSTLPDRPSTPPSDLRLSPLTPSTVRLHWCPPTEPNGEIVEYLILYSSNHTQPEHQW |
| NOV11f | VVERSTLPDRPSTPPSDLRLSPLTPSTVRLHWCPPTEPNGEIVEYLILYSSNHTQPEHQW |
| NOV11g | VVERSTLPDRPSTPPSDLRLSPLTPSTVRLHWCPPTEPNGEIVEYLILYSSNHTQPEHQW |
| NOV11h | VVERSTLPDRPSTPPSDLRLSPLTPSTVRLHWCPPTEPNGEIVEYLILYSSNNTQPEHQW |
| NOV11a | TLLTTQG--NIFSAEVHGLESDTRYFFKMGARTEVGPGPFSRLQDVITLQEKLSDSLDMH |
| NOV11b | TLLTTQGEGNIFSAEVHGLESDTRYFFKMGARTEVGPGPFSRLQDVITLQEKLSDSLDMH |
| NOV11c | TLLTTQG--NIFSAEVHGLESDTRYFFKMGARTEVGPGPFSRLQDVITLQEKLSDSV--- |
| NOV11d | TLLTTQG--NIFSAEVHGLESDTRYFFKMGARTEVGPGPFSRLQDVITLQEKLSDSVD-- |
| NOV11e | TLLTTQG--NIFSAEVHGLESDTRYFFKMGARTEVGPGPFSRLQDVITLQEKLSDSVDSF |
| NOV11f | TLLTTQC--NIFSAEVHGLESDTRYFFKMGARTEVGPGPFSRLQDVITLQEKLSDSVD-- |
| NOV11g | TLLTTQG--NIFSAEVHGLESDTRYFFKMGARTEVGPGPFSRLQDVITLQEKLSDS---- |
| NOV11h | TLLTTQG--NIFSAEVHGLESDTRYFFKMGARTEVGPGPFSRLQDVITLQEKLSDS---- |
| NOV11a | SVTGIIVGVCLGLLCLLACMCAGLRRSPHRESLPGLSSTATPGNPALYSRARLGPPSPPA |
| NOV11b | SVTGIIVGVCLGLLCLLACMCAGLRRSPHRESLPGLSSTATPGNPALYSRARLGPPSPPA |
| NOV11c | ------------------------------------------------------------ |
| NOV11d | ------------------------------------------------------------ |
| NOV11e | SWSVITAPRAPPRPATRY------------------------------------------ |
| NOV11f | ------------------------------------------------------------ |
| NOV11g | ------------------------------------------------------------ |
| NOV11h | ------------------------------------------------------------ |
| NOV11a | AHELESLVHPHPQDWSPPPSDVEDRAEVHSLMGGGVSEGRSHSKRKISWAQPSGLSWAGS |
| NOV11b | AHELESLVHPHPQDWSPPPSDVEDRAEVHSLMGGGVSEGRSHSKRK-VSAQPSGLSWAGS |
| NOV11c | ------------------------------------------------------------ |
| NOV11d | ------------------------------------------------------------ |
| NOV11e | ------------------------------------------------------------ |
| NOV11f | ------------------------------------------------------------ |
| NOV11g | ------------------------------------------------------------ |
| NOV11h | ------------------------------------------------------------ |
| NOV11a | WAGCELPQAGPRPALTRALLPPAGTGQTLLLQALVYDAIKGNGRKKSPPACRNQVEAEVI |
| NOV11b | WAGCELPQAGPRPALTRALLPPAGTGQTLLLQVLCSD--QGNGRKKSPPACRNQVEAEVI |
| NOV11c | ------------------------------------------------------------ |
| NOV11d | ------------------------------------------------------------ |
| NOV11e | ------------------------------------------------------------ |
| NOV11f | ------------------------------------------------------------ |
| NOV11g | ------------------------------------------------------------ |
| NOV11h | ------------------------------------------------------------ |
| NOV11a | VHSDFSASNGNPDLHLQDLEPEDPLPPEAPDLISGVGDPGQGAAWLDRELGGCELAAPGP |
| NOV11b | VHSDFSASNGNPDLHLQDLEPEDPLPPEAPDLISGVGDPGQGAAWLDRELGGCELAAPGP |
| NOV11c | ------------------------------------------------------------ |
| NOV11d | ------------------------------------------------------------ |
| NOV11e | ------------------------------------------------------------ |
| NOV11f | ------------------------------------------------------------ |
| NOV11g | ------------------------------------------------------------ |
| NOV11h | ------------------------------------------------------------ |
| NOV11a | DRLTCLPEAASASCSYPDLQPGEVLEETPGDSCQLKSPCPLGASPGLPRSPVSSSA |
| NOV11b | DRLTCLPEAASASCSYPDLQPGEVLEETPGDSCQLKSPCPLGASPGLPRSPVSSS- |
| NOV11c | ------------------------------------------------------------ |
| NOV11d | ------------------------------------------------------------ |
| NOV11e | ------------------------------------------------------------ |
| NOV11f | ------------------------------------------------------------ |
| NOV11g | ------------------------------------------------------------ |
| NOV11h | ------------------------------------------------------------ |
| NOV11a | (SEQ ID NO: 134) |
| NOV11b | (SEQ ID NO: 136) |
| NOV11c | (SEQ ID NO: 138) |
| NOV11d | (SEQ ID NO: 140) |
| NOV11e | (SEQ ID NO: 142) |
| NOV11f | (SEQ ID NO: 144) |
| NOV11g | (SEQ ID NO: 146) |
| NOV11h | (SEQ ID NO: 148) |

[0418] Further analysis of the NOV11a protein yielded the following properties shown in Table 11C.

TABLE 11C
Protein Sequence Properties NOV11a

| SignalP | Cleavage site between residues 25 and 26 | | | |
|---|---|---|---|---|
| analysis: | | | | |
| PSORT II | PSG: a new signal peptide prediction method | | | |
| analysis: | N-region: length 10; pos. chg 3; neg. chg 1 | | | |
| | H-region: length 12; peak value 10.30 | | | |
| | PSG score: 5.90 | | | |
| | GvH: von Heijne's method for signal seq. recognition | | | |
| | GvH score (threshold: −2.1): 1.11 | | | |
| | possible cleavage site: between 24 and 25 | | | |
| | >>> Seems to have a cleavable signal peptide (1 to 24) | | | |
| | ALOM: Klein et al's method for TM region allocation | | | |
| | Init position for calculation: 25 | | | |
| | Tentative number of TMS(s) for the threshold 0.5: 1 | | | |
| | Number of TMS(s) for threshold 0.5: 1 | | | |
| | INTEGRAL | Likelihood = | −11.89 | Transmembrane 963-979 |
| | PERIPHERAL | Likelihood = | 0.90 (at 321) | |
| | ALOM score: −11.89 (number of TMSs: 1) | | | |
| | MTOP: Prediction of membrane topology (Hartmann et al.) | | | |
| | Center position for calculation: 12 | | | |
| | Charge difference: −5.0 C(−2.0)-N(3.0) | | | |
| | N >= C: N-terminal side will be inside | | | |
| | >>> membrane topology: type 1a (cytoplasmic tail 980 to 1254) | | | |
| | MITDISC: discrimination of mitochondrial targeting seq | | | |
| | R content: | 4 | Hyd Moment(75): | 11.83 |
| | Hyd Moment(95): | 5.63 | G content: | 5 |
| | D/E content: | 2 | S/T content: | 1 |

Score: −4.74
Gavel: prediction of cleavage sites for mitochondrial preseq
R-2 motif at 33 ARG|EL
NUCDISC: discrimination of nuclear localization signals
pat4: none
pat7: PVRLKKK (4) at 696
bipartite: none
content of basic residues: 8.2%
NLS Score: −0.13
KDEL: ER retention motif in the C-terminus: none
ER Membrane Retention Signals:
XXRR-like motif in the N-terminus: ARGD
none
SKL: peroxisomal targeting signal in the C-terminus: none
PTS2: 2nd peroxisomal targeting signal: none
VAC: possible vacuolar targeting motif: none
RNA-binding motif: none
Actinin-type actin-binding motif:
type 1: none
type 2: none
NMYR: N-myristoylation pattern: none
Prenylation motif: none
memYQRL: transport motif from cell surface to Golgi: none
Tyrosines in the tail: too long tail
Dileucine motif in the tail: found
LL at 1097
LL at 1107
checking 63 PROSITE DNA binding motifs: none
checking 71 PROSITE ribosomal protein motifs: none
checking 33 PROSITE prokaryotic DNA binding motifs: none
NNCN: Reinhardt's method for Cytoplasmic/Nuclear discrimination
Prediction: cytoplasmic
Reliability: 55.5
COIL: Lupas's algorithm to detect coiled-coil regions
total: 0 residues
Final Results (k = 9/23):
55.6%: endoplasmic reticulum
22.2%: Golgi
11.1%: plasma membrane
11.1%: extracellular, including cell wall
>> prediction for CG55379-04 is end (k = 9)

[0419] A search of the NOV11a protein against the Geneseq database, a proprietary database that contains sequences published in patents and patent publication, yielded several homologous proteins shown in Table 11D.

TABLE 11D
Geneseq Results for NOV11a

| | | NOV11a | | |
|---|---|---|---|---|
| | | Residues/ | Identities/ | |
| Geneseq | Protein/Organism/Length [Patent | Match | Similarities for the | Expect |
| Identifier | #,Date] | Residues | Matched Region | Value |
| AAG65914 | Amino acid sequence of GSK gene Id | 1 . . . 1254 | 1248/1255 (99%) | 0.0 |
| | 27142 - Homo sapiens, 1250 aa. | 1 . . . 1250 | 1249/1255 (99%) | |
| | [WO200172961-A2, 04 OCT. 2001] | | | |
| AAU77405 | Human NOV1 protein, homologue of | 1 . . . 1253 | 1237/1255 (98%) | 0.0 |
| | NOPE/PUNC Ig proteins - Homo | 1 . . . 1247 | 1239/1255 (98%) | |
| | sapiens, 1247 aa. | | | |
| | [WO200206329-A2, 24 JAN. 2002] | | | |
| AAE05251 | Mouse Nope (neighbour of punc ell) | 1 . . . 1253 | 1093/1256 (87%) | 0.0 |
| | protein - Mus musculus, 1252 aa. | 1 . . . 1249 | 1146/1256 (91%) | |
| | [WO200149714-A2, 12 JUL. 2001] | | | |
| ABP69002 | Human polypeptide SEQ ID NO | 332 . . . 1254 | 919/923 (99%) | 0.0 |
| | 1049 - Homo sapiens, 980 aa. | 62 . . . 980 | 919/923 (99%) | |
| | [WO200270539-A2, 12 SEP. 2002] | | | |
| AAE05252 | Mouse Nope (neighbour of punc ell) | 24 . . . 958 | 843/937 (89%) | 0.0 |
| | extracellular domain - Mus musculus, | 1 . . . 932 | 879/937 (92%) | |
| | 932 aa. [WO200149714-A2, | | | |
| | 12 JUL. 2001] | | | |

[0420] In a BLAST search of public sequence databases, the NOV11a protein was found to have homology to the proteins shown in the BLASTP data in Table 11E.

TABLE 11E
Public BLASTP Results for NOV11a

| | | NOV11a | | |
|---|---|---|---|---|
| Protein | | Residues/ | Identities/ | |
| Accession | | Match | Similarities for the | Expect |
| Number | Protein/Organism/Length | Residues | Matched Portion | Value |
| Q8TDY8 | HDDM36 - Homo sapiens | 1 . . . 1254 | 1248/1255 (99%) | 0.0 |
| | (Human), 1250 aa. | 1 . . . 1250 | 1249/1255 (99%) | |
| Q9EQS9 | DDM36 - Mus musculus (Mouse), | 1 . . . 1253 | 1100/1256 (87%) | 0.0 |
| | 1252 aa. | 1 . . . 1249 | 1151/1256 (91%) | |
| Q9EQS8 | DDM36E - Mus musculus (Mouse), | 1 . . . 1253 | 1100/1256 (87%) | 0.0 |
| | 1253 aa. | 1 . . . 1250 | 1151/1256 (91%) | |
| Q9JLI1 | Neighbor of Punc ell protein - Mus | 1 . . . 1253 | 1093/1256 (87%) | 0.0 |
| | musculus (Mouse), 1252 aa. | 1 . . . 1249 | 1146/1256 (91%) | |
| Q9HCE4 | Hypothetical protein KIAA1628 - | 332 . . . 1254 | 919/923 (99%) | 0.0 |
| | Homo sapiens (Human), 980 aa | 62 . . . 980 | 919/923 (99%) | |
| | (fragment). | | | |

[0421] PFam analysis predicts that the NOV11a protein contains the domains shown in the Table 11F.

TABLE 11F
Domain Analysis of NOV11a

| | | Identities/ | |
|---|---|---|---|
| | | Similarities | |
| Pfam | | for the | Expect |
| Domain | NOV11a Match Region | Matched Region | Value |
| ig | 157 . . . 214 | 15/61 (25%) | 4.2e−07 |
| | | 42/61 (69%) | |
| ig | 258 . . . 313 | 19/59 (32%) | 1.3e−08 |
| | | 42/59 (71%) | |
| ig | 349 . . . 407 | 18/62 (29%) | 2.5e−05 |
| | | 42/62 (68%) | |
| fn3 | 429 . . . 515 | 27/88 (31%) | 3.1e−21 |
| | | 72/88 (82%) | |
| fn3 | 527 . . . 617 | 25/92 (27%) | 1.3e−12 |
| | | 62/92 (67%) | |
| fn3 | 634 . . . 733 | 28/103 (27%) | 1.4e−08 |
| | | 72/103 (70%) | |
| fn3 | 754 . . . 839 | 24/88 (27%) | 4.7e−09 |
| | | 57/88 (65%) | |
| fn3 | 851 . . . 939 | 28/91 (31%) | 1.7e−14 |
| | | 73/91 (80%) | |

### Example 12

[0422] The NOV12 clone was analyzed, and the nucleotide and encoded polypeptide sequences are shown in Table 12A.

TABLE 12A
NOV12 Sequence Analysis

| | | |
|---|---|---|
| NOV12a, CG55688-01 | SEQ ID NO: 149 | 1887 bp |
| DNA Sequence | ORF Start: ATG at 81 | ORF Stop: TAA at 1224 |

GCGCACGGCCTGTCCGCTGCACACCAGCTTGTTGGCGTCTTCGTCGCCGCGCTCGCCCCGGGCTACTCCTGCG
CGCCACAATGAGCTCCCGCATCGCCAGGGCGCTCGCCTTAGTCGTCACCCTTCTCCACTTGACCAGGCTGGCG
CTCTCCACCTGCCCCGCTGCCTGCCACTGCCCCCTGGAGGCGCCCAAGTGCGCGCCGGGAGTCGGGCTGGTCC
GGGACGGCTGCGGCTGCTGTAAGGTCTGCGCCAAGCAGCTCAACGAGGACTGCAGCAAAACGCAGCCCTGCGA
CCACACCAAGGGGCTGGAATGCAACTTCGGCGCCAGCTCCACCGCTCTGAAGGGGATCTGCAGAGCTCAGTCA
GAGGGCAGACCCTGTGAATATAACTCCAGAATCTACCAAAACGGGGAAAGTTTCCAGCCCAACTGTAAACATC
AGTGCACATGTATTGATGGCGCCGTGGGCTGCATTCCTCTGTGTCCCCAAGAACTATCTCTCCCCAACTTGGG
CTGTCCCAACCCTCGGCTGGTCAAAGTTACCGGGCAGTGCTGCGAGGAGTGGGTCTGTGACGAGGATAGTATC
AAGGACCCCATGGAGGACCAGGACGGCCTCCTTGGTAAGGAGCTGGGATTCGATGCCTCCGAGGTGGAGTTGA
CGAGAAACAATGAATTGATTGCAGTTGCAAAAGGCAGCTCACTGAAGCGGATCCCTGTTTTTGGAATGGAGCC
TCGCATCCGATACAACCCTTTACAAGGCCAGAAATGTATTGTTCAAACAACTTCATGGTCCCAGTGCTCAAAG
ACCTGTGGAACTGGTATCTCCACACGAGTTACCAATGACAACCCTGAGTGCCGCCTTGTGAAAGAAACCCGCA
TTTGTGAGGTGCGGCCTTGTGGACAGCCAGTGTACAGCAGCCTGAAAAAGGGCAAGAAATGCAGCAAGACCAA
GAAATCCCCCGAACCAGTCAGGTTTACTTACGCTGGATGTTTGAGTGTGAAGAAATACCGGCCCAAGTACTGC
GGTTCCTGCGTGGACGGCCGATGCTGCACGCCCCAGCTGACCAGGACTGTGAAGATGCGGTTCGCCTGCGAAG
ATGGGGAGACATTTTCCAAGAACGTCATGATGATCCAGTCCTGCAAATGCAACTACAACTGCCCGCATGCCAA
TGAAGCAGCGTTTCCCTTCTACAGGCTGTTCAATGACATTCACAAATTTAGGGACTAAATGCTACCTGGGTTT
CCAGGGCACACCTAGACAAACAAGGGAGAAGAGTGTCAGAATCAGAATCATGGAGAAAATGGGCGGGGGTGGT
GTGGGTGATGGGACTCATTGTAGAAAGGAAGCCTTGCTCATTCTTGAGGAGCATTAAGGTATTTCGAAACTGC
CAAGGGTGCTGGTGCGGATGGACACTAATGCAGCCACGATTGGAGAATACTTTGCTTCATAGTATTGGAGCAC
ATGTTACTGCTTCATTTTGGAGCTTGTGGAGTTGATGACTTTCTGTTTTCTGTTTGTAAATTATTTGCTAAGC
ATATTTTCTCTAGGCTTTTTTCCTTTTGGGGTTCTACAGTCGTAAAAGAGATAATAAGATTAGTTGGACAGTT
TAAAGCTTTTATTCGTCCTTTGACAAAAGTAAATGGGAGGGCATTCCATCCCTTCCTGAAGGGGGACACTCCA
TGAGTGTCTGTGAGAGGCAGCTATCTGCACTCTAAACTGCAAACAGAAATCAGGTGTTTTAAGACTGAATGTT
TTATTTATCAAAATGTAGCTTTTGGGGAGGGAGGGGAAATGTAATACTGGAATAATTTGTAAATGATTTTAAT
TTTATATTCAGTGAAAAGATTTTATTTATGGAATTAACCATTTAATAAAGAAATATTTACCT

| | | | |
|---|---|---|---|
| NOV12a, CG55688-01 | | | |
| Protein Sequence | SEQ ID NO: 150 | 381 aa | MW at 42069.1kD |

MSSRIARALALVVTLLHLTRLALSTCPAACHCPLEAPKCAPGVGLVRDGCGCCKVCAKQLNEDCSKTQPCDHT
KGLECNFGASSTALKGICRAQSEGRPCEYNSRIYQNGESFQPNCKHQCTCIDGAVGCIPLCPQELSLPNLGCP
NPRLVKVTGQCCEEWVCDEDSIKDPMEDQDGLLGKELGFDASEVELTRNNELIAVGKGSSLKRIPVFGMEPRI
RYNPLQGQKCIVQTTSWSQCSKTCGTGISTRVTNDNPECRLVKETRICEVRPCGQPVYSSLKKGKKCSKTKKS
PEPVRFTYAGCLSVKKYRPKYCGSCVDGRCCTPQLTRTVKMRFRCEDGETFSKNVMMIQSCKCNYNCPHANEA
AFPFYRLFNDIHKFRD

| | | |
|---|---|---|
| NOV12b, 254087906 | SEQ ID NO: 151 | 1158 bp |
| DNA Sequence | ORF Start: at 1 | ORF Stop: end of sequence |

AGATCTACCATGAGCTCCCGCATCGCCAGGGCGCTCGCCTTAGTCGTCACCCTTCTCCACTTGACCAGGCTGG
CGCTCTCCACCTGCCCCGCTGCCTGCCACTGCCCCCTGGAGGCGCCCAAGTGCGCGCCGGGAGTCGCGCTGGT
CCGGGACGGCTGCGGCTGCTGTAAGGTCTGCGCCAAGCAGCTCAACGAGGACTGCAGCAAAACGCAGCCCTGC
GACCACACCAAGGGGCTGGAATGCAACTTCGGCGCCAGCTCCACCGCTCTGAAGGGGATCTGCAGAGCTCAGT
CAGAGGGCAGACCCTGTGAATATAACTCCAGAATCTACCAAAACGGGGAAAGTTTCCAGCCCAACTGTAAACA
TCAGTGCACATGTATTGATGGCGCCGTGGGCTGCATTCCTCTGTGTCCCCAAGAACTATCTCTCCCCAACTTG
GGCTGTCCCAACCCTCGGCTGGTCAAAGTTACCGGGCAGTGCTGCGAGGAGTGGGTCTGTGACGAGGATAGTA
TCAAGGACCCCATGGAGGACCAGGACGGCCTCCTTGGCAAGGAGCTGGGATTCGATGCCTCCGAGGTGGAGTT
GACGAGAAACAATGAATTGATTGCAGTTGGAAAAGGCAGCTCACTGAAGCGGCTCCCTGTTTTTGGAATGGAG
CCTCGCATCCTATACAACCCTTTACAAGGCCAGAAATGTATTGTTCAAACAACTTCATGGTCCCAGTGCTCAA
AGACCTGTGGAACTGGTATCTCCACACGAGTTACCAATGACAACCCTGAGTGCCGCCTTGTGAAAGAAACCCG
GATTTGTGAGGTGCGGCCTTGTGGACAGCCAGTGTACAGCAGCCTGAAAAAGGGCAAGAAATGCAGCAAGACC
AAGAAATCCCCCGAACCAGTCAGGTTTACTTACGCTGGATGTTTGAGTGTGAAGAAATACCGGCCCAAGTACT
GCGGTTCCTGCGTGGACGGCCGATGCTGCACGCCCCAGCTGACCAGGACTGTGAAGATGCGGTTCCGCTGCGA
AGATGGGGAGACATTTTCCAAGAACGTCATGATGATCCAGTCCTGCAAATGCAACTACAACTGCCCGCATGCC
AATGAAGCAGCGTTTCCCTTCTACAGGCTGTTCAATGACATTCACAAATTTAGGGACCTCGAG

| | | | |
|---|---|---|---|
| NOV12b, 254087906 | | | |
| Protein Sequence | SEQ ID NO: 152 | 386 aa | MW at 42612.7kD |

RSTMSSRIARALALVVTLLHLTRLALSTCPAACHCPLEAPKCAPGVGLVRDGCGCCKVCAKQLNEDCSKTQPC
DHTKGLECNFGASSTALKGICRAQSEGRPCEYNSRIYQNGESFQPNCKHQCTCIDGAVGCIPLCPQELSLPNL
GCPNPRLVKVTGQCCEEWVCDEDSIKDPMEDQDGLLGKELGFDASEVELTRNNELIAVGKGSSLKRLPVFGME
PRILYNPLQGQKCIVQTTSWSQCSKTCGTGISTRVTNDNPECRLVKETRICEVRPCGQPVYSSLKKGKKCSKT
KKSPEPVRFTYAGCLSVKKYRPKYCGSCVDGRCCTPQLTRTVKMRFRCEDGETFSKNVMMIQSCKCNYNCPHA
NEAAFPFYRLFNDIHKFRDLE

| | | |
|---|---|---|
| NOV12c, 259278648 | SEQ ID NO: 153 | 204 bp |
| DNA Sequence | ORF Start: at 1 | ORF Stop: end of sequence |

AGATCTTGTGAATATAACTCCAGAATCTACCAAAACGGGGAAAGTTTCCAGCCCAACTGTAAACATCAGTGCA
CATGTATTGATGGCGCCGTGGGCTGCATTCCTCTGTCTCCCCAAGAACTATCTCTCCCCAACTTGGGCTGTCC
CAACCCTCGGCTGGTCAAAGTTACCGGGCAGTGCTGCGAGGAGTGGGTCTGTCTCGAG

| | | | |
|---|---|---|---|
| NOV12c, 259278648 | | | |
| Protein Sequence | SEQ ID NO: 154 | 68 aa | MW at 7576.6kD |

RSCEYNSRIYQNGESFQPNCKHQCTCIDGAVGCIPLCPQELSLPNLGCPNPRLVKVTGQCCEEWVCLE

| | | |
|---|---|---|
| NOV12d, 259280032 | SEQ ID NO: 155 | 228 bp |
| DNA Sequence | ORF Start: at 1 | ORF Stop: end of sequence |

AGATCTTGCCCCGCTGCCTGCCACTGCCCCCTGGAGGCGCCCAAGTGCGCGCCGGGAGTCGGGCTGGTCCGGG
ACGGCTGCGGCTGCTGTAAGGTCTGCGCCAAGCAGCTCAACGAGGACTGCAGCAAAACGCAGCCCTGCGACCA
CACCAAGGGGCTGGAATGGAACTTCGGCGCCAGCTCCACCGCTCTGAAGGGGATCTGCAGAGCTCAGTCAGAG
GGCCTCGAG

| | | | |
|---|---|---|---|
| NOV12d, 259280032 | | | |
| Protein Sequence | SEQ ID NO: 156 | 76 aa | MW at 7856.9kD |

RSCPAACHCPLEAPKCAPGVGLVRDGCGCCKVCAKQLNEDCSKTQPCDHTKGLECNFGASSTALKGICRAQSE
GLE

| | | |
|---|---|---|
| NOV12e, 254756530 | SEQ ID NO: 157 | 228 bp |
| DNA Sequence | ORF Start: at 1 | ORF Stop: end of sequence |

AGATCTTGCCCCGCTGCCTGCCACTGCCCCCTGGAGGCGCCCAAGTGCGCGCCGGGAGTCGGGCTGGTCCGGG
ACGGCTGCGGCTGCTGTAAGGTCTGCGCCAAGCAGCTCAACGAGGACTGCAGCAAAACGCAGCCCTGCGACCA
CACCAAGGGGCTGGAATGCAACTTCGGCGCCAGCTCCACCGCTCTGAAGGGGATCTGCAGAGCTCAGTCAGAG
GGCCTCGAG

| | | | |
|---|---|---|---|
| NOV12e, 254756530 | | | |
| Protein Sequence | SEQ ID NO: 158 | 76 aa | MW at 7856.9kD |

RSCPAACHCPLEAPKCAPGVGLVRDGCGCCKVCAKQLNEDCSKTQPCDHTKGLECNFGASSTALKGICRAQSE
GLE

| | | |
|---|---|---|
| NOV12f, 229509618 | SEQ ID NO: 159 | 1228 bp |
| DNA Sequence | ORF Start: at 3 | ORF Stop: at 1227 |

TGTACAAGAAAGCTGGGTCGCCGCGCCCACCCTTCACCACCATGAGCTCCCGCATCGCCAGGGCGCTCGCCTT
AGTCGTCACCCTTCTCCACTTGACCAGGCTGGCGCTCTCCACCTGCCCCGCTGCCTGCCACTGCCCCCTGGAG
GCGCCCAAGTGCGCGCCGGGAGTCGGGCTGGTCCGGGACGGCTGCGGCTCCTGTAAGGTCTGCGCCAAGCAGC
TCAACGAGGACTGCAGCAAAACGCAGCCCTGCGACCACACCAAGGGGCTGGAATGCAACTTCGGCGCCAGCTC
CACCGCTCTGAAGGGGATCTGCAGAGCTCAGTCAGAGGGCAGACCCTGTGAATATAACTCCAGAATCTACCAA
AACGGGGAAAGTTTCCAGCCCAACTGTAAACATCAGTGCACATGTATTGATGGCGCCGTGGGCTGCATTCCTC
TGTGTCCCCAAGAACTATCTCTCCCCAACTTGGGCTGTCCCAACCCTCGGCTGGTCAAAGTTACCGGGCAGTG
CTGCGAGGAGTGGGTCTGTGACGAGGATAGTATCAAGGACCCCATGGAGGACCAGGACGGCCTCCTTGGCAAG
GAGCTGGGATTCGATGCCTCCGAGGTGGAGTTGACGAGAAACAATGAATTGATTGCAGTTGGAAAAGGCAGCT
CACTGAAGCGGCTCCCTGTTTTTGGAATGGAGCCTCGCATCCTATACAACCCTTTACAAGGCCAGAAATGTAT
TGTTCAAACAACTTCATGGTCCCAGTGCTAAACGACCTGTGGAACTGGTATCTCCACACGAGTTACCAATGAC
AACCCTGAGTGCCGCCTTGTGAAAGAAACCCGGATTTGTGAGGTGCGGCCTTGTGGACAGCCAGTGTACAGCA
GCCTGAAAAAGGGCAAGAAATGCAGCAAGACCAAGAAATCCCCCGAACCAGTCAGGTTTACTTACGCTGGATG
TTTGAGTGTGAAGAAATACCGGCCCAAGTACTGCGGTTCCTGCGTGGACGGCCGATGCTGCACGCCCCAGCTG
ACCAGGACTGTGAAGATGCGGTTCCGCTGCGAAGATGGGGAGACATTTTCCAAGAACGTCATGATGATCCAGT
CCTGCAAATGCAACTACAACTGCCCGCATGCCAATGAAGCAGCGTTTCCCTTCTACAGGCTGTTCAATGACAT
TCACAAATTTAGGGACAAGGGTGGGCGCGCCCTTTCTCGAGTACGGCGGCCGCGGAGCCT

| | | | |
|---|---|---|---|
| NOV12f, 229509618 | | | |
| Protein Sequence | SEQ ID NO: 160 | 408 aa | MW at 45009.5kD |

YKKAGSARPPFTTMSSRIARALALVVTLLHLTRLALSTCPAACHCPLEAPKCAPGVGLVRDGCGCCKVCAKQL
NEDCSKTQPCDHTKGLECNFGASSTALKGICRAQSEGRPCEYNSRIYQNGESFQPNCKHQCTCIDGAVGCIPL
CPQELSLPNLGCPNPRLVKVTGQCCEEWVCDEDSIKDPMEDQDGLLGKELGFDASEVELTRNNELIAVGKGSS
LKRLPVFGMEPRILYNPLQGQKCIVQTTSWSQCSKTCGTGISTRVTNDNPECRLVKETRICEVRPCGQPVYSS
LKKGKKCSKTKKSPEPVRFTYAGCLSVKKYRPKYCGSCVDGRCCTPQLTRTVKMRFRCEDGETFSKNVMMIQS
CKCNYNCPHANEAAFPFYRLFNDIHKFRDKGGRALSRVRRPRS

| | | |
|---|---|---|
| NOV12g, 229509658 | SEQ ID NO: 161 | 1111 bp |
| DNA Sequence | ORF Start: at 2 | ORF Stop: end of sequence |

AGGCTCCGCGGCCGCCCCCTTCACCACCTGCCCCGCTGCCTGCCACTGCCCCCTGGAGGCGCCCAAGTGCGCG
CCGGGAGTCGGGCTGGTCCGGGACGGCTGCGGCTGCTGTAAGGTCTGCGCCAAGCAGCTCAACCAGGACTGCA
GCAAAACGCACCCCTGCGACCACACCAAGGGGCTGGAATGCAACTTCGGCGCCAGCTCCACCGCTCTGAAGGG
GATCTGCAGAGCTCAGTCAGAGGGCAGACCCTGTGAATATAACTCCAGAATCTACCAAAACGGGGAAAGTTTC
CAGCCCAACTGTAAACATCAGTGCACATGTATTGATGGCGCCGTGGGCTGCATTCCTCTGTGTCCCCAAGAAC
TATCTCTCCCCAACTTGGGCTGTCCCAACCCTCGGCTGGTCAAAGTTACCGGGCAGTGCTGCGAGGAGTGGGT
CTGTGACGAGGATAGTATCAAGGACCCCATGGAGGACCAGGACGGCCTCCTTGGCAAGGAGCTGGGATTCGAT
GCCTCCGAGGTGGAGTTAACGAGAAACAATGAATTGATTGCAGTTGGAAAAGGCAGCTCACTGAAGCGGCTCC
CTGTTTTTGGAATGGAGCCTCGCATCCTATACAACCCTTTACAAGGCCAGAAATGTATTGTTCAAACAACTTC
ATGGTCCCAGTGCTCAAAGACCTGTGGAACTGGTATCTCCACACGAGTTACCAATGACAACCCTGAGTGCCGC
CTTGTGAAAGAAACCCGCATTTGTGAGGTGCGGCCTTGTGGACAGCCAGTGTACAGCAGCCTGAAAAAGGGCA
AGAAATGCAGCAAGACCAAGAAATCCCCCGAACCAGTCAGGTTTACTTACGCTGGATGTTTGAGTGTGAAGAA
ATACCGGCCCAAGTACTGCGGTTCCTGCGTGGACGCCCGATGCTGCACGCCCCAGCTGACCAGGACTGTGAAG
ATGCGGTTCCGCTGCGAAGATGGGGAGACATTTTCCAAGAACGTCATGATGATCCAGTCCTGCAAATGCAACT
ACAACTGCCCGCATGCCAATGAAGCAGCGTTTCCCTTCTACAGGCTGTTCAATGACATTCACAAATTTAGGGA
CAAGGGTGGGCGCGCC

| | | | |
|---|---|---|---|
| NOV12g, 229509658 | | | |
| Protein Sequence | SEQ ID NO: 162 | 370 aa | MW at 40610.3kD |

GSAAAPFTTCPAACHCPLEAPKCAPGVGLVRDGCGCCKVCAKQLNEDCSKTQPCDHTKGLECNFGASSTALKG
ICRAQSEGRPCEYNSRIYQNGESFQPNCKHQCTCIDGAVGCIPLCPQELSLPNLGCPNPRLVKVTGQCCEEWV
CDEDSIKDPMEDQDGLLGKELGFDASEVELTRNNELIAVGKGSSLKRLPVFGMEPRILYNPLQGQKCIVQTTS
WSQCSKTCGTGISTRVTNDNPECRLVKETRICEVRPCGQPVYSSLKKGKKCSKTKKSPEPVRFTYAGCLSVKK
YRPKYCGSCVDGRCCTPQLTRTVKMRFRCEDGETFSKNVMMIQSCKCNYNCPHANEAAFPFYRLFNDIHKFRD
KGGRA

| | | |
|---|---|---|
| NOV12h, CG55688-02 | SEQ ID NO: 163 | 1068 bp |
| DNA Sequence | ORF Start: at 1 | ORF Stop: end of sequence |

ACCTGCCCCGCTGCCTGCCACTGCCCCCTGGAGGCGCCCAAGTGCGCGCCGGGAGTCGGGCTGGTCCGGGACG
GCTGCGGCTGCTGTAAGGTCTGCGCCAAGCAGCTCAACGAGGACTGCAGCAAAACGCAGCCCTGCGACCACAC
CAAGGGGCTGGAATGCAACTTCGGCGCCAGCTCCACCGCTCTGAAGGGGATCTGCAGAGCTCAGTCAGAGGGC
AGACCCTGTGAATATAACTCCAGAATCTACCAAAACGGGGAAAGTTTCCAGCCCAACTGTAAACATCAGTGCA
CATGTATTGATGGCGCCGTGGGCTGCATTCCTCTGTGTCCCCAAGAACTATCTCTCCCCAACTTGGGCTGTCC
CAACCCTCGGCTGGTCAAAGTTACCGGGCAGTGCTGCGAGGAGTGGGTCTGTGACGAGGATAGTATCAAGGAC
CCCATGGAGGACCAGGACGGCCTCCTTGGCAAGGAGCTGGGATTCGATGCCTCCGAGGTGCAGTTGACGAGAA
ACAATGAATTGATTGCAGTTGGAAAAGGCAGCTCACTGAAGCGGCTCCCTGTTTTTGGAATGGAGCCTCGCAT
CCTATACAACCCTTTACAAGGCCAGAAATGTATTGTTCAAACAACTTCATGGTCCCAGTGCTCAAAGACCTGT
GGAACTGGTATCTCCACACGAGTTACCAATGACAACCCTGAGTGCCGCCTTGTGAAAGAAACCCGGATTTGTG
AGGTGCGGCCTTGTGGACAGCCAGTGTACAGCAGCCTGAAAAAGGGCAAGAAATGCAGCAAGACCAAGAAATC
CCCCGAACCAGTCAGGTTTACTTACGCTGGATGTTTGAGTGTGAAGAAATACCGGCCCAAGTACTGCGGTTCC
TGCGTGGACGGCCGATGCTGCACGCCCCAGCTGACCAGGACTGTGAAGATGCGGTTCCGCTGCGAAGATGGGG
AGACATTTTCCAAGAACGTCATGATGATCCAGTCCTGCAAATGCAACTACAACTGCCCGCACGCCAATGAAGC
AGCGTTTCCCTTCTACAGGCTGTTCAATGACATTCACAAATTTAGG

| | | | |
|---|---|---|---|
| NOV12h, CG55688-02 | | | |
| Protein Sequence | SEQ ID NO: 164 | 356 aa | MW at 39322.9kD |

TCPAACHCPLEAPKCAPGVGLVRDGCGCCKVCAKQLNEDCSKTQPCDHTKGLECNFGASSTALKGICRAQSEG
RPCEYNSRIYQNGESFQPNCKHQCTCIDGAVGCIPLCPQELSLPNLGCPNPRLVKVTGQCCEEWVCDEDSIKD
PMEDQDGLLGKELGFDASEVELTRNNELIAVGKGSSLKRLPVFGMEPRILYNPLQGQKCIVQTTSWSQCSKTC
GTGISTRVTNDNPECRLVKETRICEVRPCGQPVYSSLKKGKKCSKTKKSPEPVRFTYAGCLSVKKYRPKYCGS
CVDGRCCTPQLTRTVKMRFRCEDGETFSKNVMMIQSCKCNYNCPHANEAAFPFYRLFNDINKFR

| | | |
|---|---|---|
| NOV12i, CG55688-03 | SEQ ID NO: 165 | 1198 bp |
| DNA Sequence | ORF Start: at 2 | ORF Stop: end of sequence |

GTACAAAAAAGCAGGCTCCGCGGCCGCCCCCTTCACCACCATGAGCTCCCGCATCGCCAGGGCGCTCGCCTTA
GTCGTCACCCTTCTCCACTTGACCAGGCTGGCGCTCTCCACCTGCCCCGCTGCCTGCCACTGCCCCCTGGAGG
CGCCCAAGTGCGCGCCGGGAGTCGGGCTGGTCCGGGACGGCTGCGCCTGCTGTAAGGTCTGCGCCAAGCAGCT
CAACGAGGACTGCAGCAAAACGCAGCCCTGCGACCACACCAAGGGGCTGGAATGCAACTTCGGCGCCAGCTCC
ACCGCTCTGAAGGGGATCTGCAGAGCTCAGTCAGAGGGCAGACCCTGTGAATATAACTCCAGAATCTACCAAA
ACGGGGAAAGTTTCCAGCCCAACTGTAAACATCAGTGCACATGTATTGATGGCGCCGTGGGCTGCATTCCTCT
GTGTCCCCAAGAACTATCTCTCCCCAACTTGGGCTGTCCCAACCCTCGGCTGGTCAAAGTTACCGGGCAGTGC
TGCGAGGAGTGGGTCTGTGACGAGGATAGTATCAAGGACCCCATGGAGGACCAGGACGGCCTCCTTGGCAAGG
AGCTGGGATTCGATGCCTCCGAGGTGGAGTTGACGAGAAACAATGAATTGATTGCAGTTGGAAAAGGCAGCTC
ACTGAAGCGGCTCCCTGTTTTTGGAATGGAGCCTCGCATCCTATACAACCCTTTACAAGGCCAGAAATGTATT
GTTCAAACAACTTCATGGTCCCAGTGCTCAAAGACCTGTGGAACTGGTATCTCCACACGAGTTACCAATGACA
ACCCTGAGTGCCGCCTTGTGAAAGAAACCCGGATTTGTGAGGTGCGGCCTTGTGGACAGCCAGTGTACAGCAG
CCTGAAAAAGGGCAAGAAATGCAGCAAGACCAAGAAATCCCCCGAACCAGTCAGGTTTACTTACGCTGGATGT
TTGAGTGTGAAGAAATACCGGCCCAAGTACTGCGGTTCCTGCGTGGACGGCCGATGCTGCACGCCCCAGCTGA
CCAGGACTGTGAAGATGCGGTTCCGCTGCGAAGATGGGGAGACATTTTCCAAGAACGTCATGATGATCCAGTC
CTGCAAATGCAACTACAACTGCCCGCATGCCAATGAAGCAGCGTTTCCCTTCTACAGGCTGTTCAATGACATT
CACAAATTTAGGGACAAGGGTGGGCGCGCC

| | | | |
|---|---|---|---|
| NOV12i, CG55688-03 | | | |
| Protein Sequence | SEQ ID NO: 166 | 399 aa | MW at 43790.1kD |

YKKAGSAAAPFTTMSSRIARALALVVTLLHLTRLALSTCPAACHCPLEAPKCAPGVGLVRDGCGCCKVCAKQL
NEDCSKTQPCDHTKGLECNFGASSTALKGICRAQSEGRPCEYNSRIYQNGESFQPNCKHQCTCIDGAVGCIPL
CPQELSLPNLGCPNPRLVKVTGQCCEEWVCDEDSIKDPMEDQDGLLGKELGFDASEVELTRNNELIAVGKGSS
LKRLPVFGMEPRILYNPLQGQKCIVQTTSWSQCSKTCGTGISTRVTNDNPECRLVKETRICEVRPCGQPVYSS
LKKGKKCSKTKKSPEPVRFTYAGCLSVKKYRPKYCGSCVDGRCCTPQLTRTVKMRFRCEDGETFSKNVMMIQS
CKCNYNCPHANEAAFPFYRLFNDIHKFRDKGGRA

| | | |
|---|---|---|
| NOV12j, CG55688-04 | SEQ ID NO: 167 | 1111 bp |
| DNA Sequence | ORF Start: at 2 | ORF Stop: end of sequence |

AGGCTCCGCGGCCGCCCCCTTCACCACCTGCCCCGCTGCCTGCCACTGCCCCCTGGAGGCGCCCAAGTGCGCG
CCGGGAGTCGGGCTGGTCCGGGACGGCTGCGGCTGCTGTAAGGTCTGCGCCAAGCAGCTCAACGAGGACTGCA
GCAAAACGCAGCCCTGCGACCACACCAAGGGGCTGGAATGCAACTTCGGCGCCAGCTCCACCGCTCTGAAGGG
GATCTGCAGAGCTCAGTCAGAGGGCAGACCCTGTGAATATAACTCCAGAATCTACCAAAACGGGGAAAGTTTC
CAGCCCAACTGTAAACATCAGTGCACATGTATTGATGGCGCCGTGGGCTGCATTCCTCTGTGTCCCCAAGAAC
TATCTCTCCCCAACTTGGGCTGTCCCAACCCTCGGCTGGTCAAAGTTACCGGGCAGTGCTGCGAGGAGTGGGT
CTGTGACGAGGATAGTATCAAGGACCCCATGGAGGACCAGGACGGCCTCCTTGGCAAGGAGCTGGGATTCGAT
GCCTCCGAGGTGGAGTTAACGAGAAACAATGAATTGATTGCAGTTGGAAAAGGCAGCTCACTGAAGCGGCTCC
CTGTTTTTGGAATCGAGCCTCGCATCCTATACAACCCTTTACAAGGCCAGAAATGTATTGTTCAAACAACTTC
ATGGTCCCAGTGCTCAAAGACCTGTGGAACTGGTATCTCCACACGAGTTACCAATGACAACCCTGAGTGCCGC
CTTGTGAAAGAAACCCGGATTTGTGAGGTGCGGCCTTGTGGACAGCCAGTGTACAGCAGCCTGAAAAAGGGCA
AGAAATGCAGCAAGACCAAGAAATCCCCCGAACCAGTCAGGTTTACTTACGCTGGATGTTTGAGTGTGAAGAA
ATACCGGCCCAAGTACTGCGGTTCCTGCGTGGACGGCCGATGCTGCACGCCCCAGCTGACCAGGACTGTGAAG
ATGCGGTTCCGCTGCGAAGATGGGGAGACATTTTCCAAGAACGTCATGATGATCCAGTCCTGCAAATGCAACT
ACAACTGCCCGCATGCCAATGAAGCAGCGTTTCCCTTCTACAGGCTGTTCAATGACATTCACAAATTTAGGGA
CAAGGGTGGGCGCGCC

| | | | |
|---|---|---|---|
| NOV12j, CG55688-04 | | | |
| Protein Sequence | SEQ ID NO: 168 | 370 aa | MW at 406 10.3kD |

GSAAAPFTTCPAACHCPLEAPKCAPGVGLVRDGCGCCKVCAKQLNEDCSKTQPCDHTKGLECNFGASSTALKG
ICRAQSEGRPCEYNSRIYQNGESFQPNCKHQCTCIDGAVGCIPLCPQELSLPNLGCPNPRLVKVTGQCCEEWV
CDEDSIKDPMEDQDGLLGKELGFDASEVELTRNNELIAVGKGSSLKRLPVFGMEPRILYNPLQGQKCIVQTTS
WSQCSKTCGTGISTRVTNDNPECRLVKETRICEVRPCGQPVYSSLKKGKKCSKTKKSPEPVRFTYAGCLSVKK
YRPKYCGSCVDGRCCTPQLTRTVKMRFRCEDGETFSKNVMMIQSCKCNYNCPHANEAAFPFYRLFNDIHKFRD
KGGRA

| | | |
|---|---|---|
| NOV12k, CG55688-05 | SEQ ID NO: 169 | 1174 bp |
| DNA Sequence | ORF Start: ATG at 23 | ORF Stop: at 1166 |

GAATTCGCCCTTCACCAGATCTATGAGCTCCCGCATCGCCAGGGCGCTCGCCTTAGTCGTCACCCTTCTCCAC
TTGACCAGGCTGGCGCTCTCCACCTGCCCCGCTGCCTGCCACTGCCCCCTGGAGGCGCCCAAGTGCGCGCCGG
GAGTCGGGCTGGTCCGGGACGGCTGCGGCTGCTGTAAGGTCTGCGCCAAGCAGCTCAACGAGGACTGCAGCAA
AACGCAGCCCTGCGACCACACCAAGGGGCTGGAATGCAACTTCGGCGCCAGCTCCACCGCTCTGAAGGGGATC
TGCAGAGCTCAGTCAGAGGGCAGACCCTGTGAATATAACTCCAGAATCTACCAAAACGGGGAAAGTTTCCAGC
CCAACTGTAAACATCAGTGCACATGTATTGATGGCGCCGTGGGCTGCATTCCTCTGTGTCCCCAAGAACTATC
TCTCCCCAACTTGGGCTGTCCCAACCCTCGGCTGGTCAAAGTTACCGGGCAGTGCTGCGAGGAGTGGGTCTGT
GACGAGGATAGTATCAAGGACCCCATGGAGGACCAGGACGGCCTCCTTGGCAAGGAGCTGGGATTCGATGCCT
CCGAGGTGGAGTTGACGAGAAACAATGAATTGATTGCAGTTGGAAAAGGCAGCTCACTGAAGCGGCTCCCTGT
TTTTGGAATGGAGCCTCGCATCCTATACAACCCTTTACAAGGCCAGAAATGTATTGTTCAAACAACTTCATGG
TCCCAGTGCTCAAAGACCTGTGGAACTGGTATCTCCACACGAGTTACCAATGACAACCCTGAGTGCCGCCTTG
TGAAAGAAACCCGGATTTGTGAGGTGCGGCCTTGTGGACAGCCAGTGTACAGCAGCCTGAAAAAGGGCAAGAA
ATGCAGCAAGACCAAGAAATCCCCCGAACCAGTCAGGTTTACTTACGCTGGATGTTTGAGTGTGAAGAAATAC
CGGCCCAAGTACTGCGGTTCCTGCGTGGACGGCCGATGCTGCACGCCCCAGCTGACCAGGACTGTGAAGATGC
GGTTCCGCTGCGAAGATGGGGAGACATTTTCCAAGAACGTCATGATGATCCAGTCCTGCAAATGCAACTACAA
CTGCCCGCATGCCAATGAAGCAGCGTTTCCCTTCTACAGGCTGTTCAATGACATTCACAAATTTAGGGACCTC
GAGGGC

| | | | |
|---|---|---|---|
| NOV12k, CG55688-05 | | | |
| Protein Sequence | SEQ ID NO: 170 | 381 aa | MW at 42026.1kD |

MSSRIARALALVVTLLHLTRLALSTCPAACHCPLEAPKCAPGVGLVRDGCGCCKVCAKQLNEDCSKTQPCDHT
KGLECNFGASSTALKGICRAQSEGRPCEYNSRIYQINGESFQPNCKHQCTCIDGAVGCIPLCPQELSLPNLGCP
NPRLVKVTGQCCEEWVCDEDSIKDPMEDQDGLLGKELGFDASEVELTRNNELIAVGKGSSLKRLPVFGMEPRI
LYNPLQGQKCIVQTTSWSQCSKTCGTGISTRVTNDNPECRLVKETRICEVRPCGQPVYSSLKKGKKCSKTKKS
PEPVRFTYAGCLSVKKYRPKYCGSCVDGRCCTPQLTRTVKMRFRCEDGETFSKNVMMIQSCKCNYNCPHANEA
AFPFYRLFNDIHKFRD

| | | |
|---|---|---|
| NOV12l, CG55688-06 | SEQ ID NO: 171 | 1168 bp |
| DNA Sequence | ORF Start: ATG at 14 | ORF Stop: TAG at 1157 |

CACCGGATCCACCATGAGCTCCCGCATCGCCAGGGCGCTCGCCTTAGTCGTCACCCTTCTCCACTTGACCAGG
CTGGCGCTCTCCACCTGCCCCGCTGCCTGCCACTGCCCCCTGGAGGCGCCCAAGTGCGCGCCGGGAGTCGGGC
TGGTCCGGGACGGCTGCGGCTGCTGTAAGGTCTGCGCCAAGCAGCTCAACGAGGACTGCAGCAAAACGCAGCC
CTGCGACCACACCAAGGGGCTGGAATGCAACTTCGGCGCCAGCTCCACCGCTCTGAAGGGGATCTGCAGAGCT
CAGTCAGAGGGCAGACCCTGTGAATATAACTCCAGAATCTACCAAAACGGGGAAAGTTTCCAGCCCAACTGTA
AACATCAGTGCACATGTATTGATGGCGCCGTCGGCTGCATTCCTCTGTGTCCCCAAGAACTATCTCTCCCCAA
CTTGGGCTGTCCCAACCCTCGGCTGGTCAAAGTTACCGGGCAGTGCTGCGAGGAGTGGGTCTGTGACCAGGAT
AGTATCAAGGACCCCATGGAGGACCAGGACGGCCTCCTTGGCAAGGAGCTGGGATTCGATGCCTCCGAGGTGG
AGTTGACGAGAAACAATGAATTGATTGCAGTTGGAAAAGGCAGCTCACTGAAGCGGCTCCCTGTTTTTGGAAT
GGAGCCTCGCATCCTATACAACCCTTTACAAGGCCAGAAATGTATTGTTCAAACAACTTCATGGTCCCAGTGC
TCAAAGACCTGTGGAACTGGTATCTCCACACGAGTTACCAATGACAACCCTGAGTGCCGCCTTGTGAAAGAAA
CCCGGATTTGTGAGGTGCGGCCTTGTGGACAGCCAGTGTACAGCAGCCTGAAAAAGGGCAAGAAATGCAGCAA
GACCAAGAAATCCCCCGAACCAGTCAGGTTTACTTACGCTGGATGTTTGAGTGTGAAGAAATACCGGCCCAAG
TACTGCGGTTCCTGCGTGGACGGCCGATGCTGCACGCCCCAGCTGACCAGGACTGTGAAGATGCGGTTCCGCT
GCGAAGATGGGGAGACATTTTCCAAGAACGTCATGATGATCCAGTCCTGCAAATGCAACTACAACTGCCCGCA
TGCCAATGAAGCAGCGTTTCCCTTCTACAGGCTGTTCAATGACATTCACAAATTTAGGGACTAGGTCGACGGC

| | | | |
|---|---|---|---|
| NOV12l, CG55688-06 | | | |
| Protein Sequence | SEQ ID NO: 172 | 381 aa | MW at 42026.1kD |

[sequence omitted]

| | | |
|---|---|---|
| | SEQ ID NO: 173 | 1887 bp |
| NOV12m, SNP13376428 of | ORF Start: ATG at 81 | ORF Stop: TAA at 1224 |
| CG55688-01, DNA Sequence | SNP Pos: 571 | SNP change: A to G |

GCGCACGGCCTGTCCGCTGCACACCAGCTTGTTGGCGTCTTCGTCGCCGCGCTCGCCCCGGGCTACTCCTGCG
CGCCACAATGAGCTCCCGCATCGCCAGGGCGCTCGCCTTAGTCGTCACCCTTCTCCACTTGACCAGGCTGGCG
CTCTCCACCTGCCCCGCTGCCTGCCACTGCCCCCTGGAGGCGCCCAAGTGCGCGCCGGGAGTCGGGCTGGTCC
GGGACGGCTGCGGCTGCTGTAAGGTCTGCGCCAAGCAGCTCAACGAGGACTGCAGCAAAACGCAGCCCTGCGA
CCACACCAAGGGGCTGGAATGCAACTTCGGCGCCAGCTCCACCGCTCTGAAGGGGATCTGCAGAGCTCAGTCA
GAGGGCAGACCCTGTGAATATAACTCCAGAATCTACCAAAACGGGGAAAGTTTCCAGCCCAACTGTAAACATC
AGTGCACATGTATTGATGGCGCCGTGGGCTGCATTCCTCTGTGTCCCCAAGAACTATCTCTCCCCAACTTGGG
CTGTCCCAACCCTCGGCTGGTCAAAGTTACCGGGCAGTGCTGCGAGGAGTGGGTCTGTGGCGAGGATAGTATC
AAGGACCCCATGGAGGACCAGGACGGCCTCCTTGGTAAGGAGCTGGGATTCGATGCCTCCGAGGTGGAGTTGA
CGAGAAACAATGAATTGATTGCAGTTGGAAAAGGCAGCTCACTGAAGCGGATCCCTGTTTTTGGAATGGAGCC
TCGCATCCGATACAACCCTTTACAAGGCCAGAAATGTATTGTTCAAACAACTTCATGGTCCCAGTGCTCAAAG
ACCTGTGGAACTGGTATCTCCACACGAGTTACCAATGACAACCCTGAGTGCCGCCTTGTGAAAGAAACCCGGA
TTTGTGAGGTGCGGCCTTGTGGACAGCCAGTGTACAGCAGCCTGAAAAAGGGCAAGAAATGCAGCAAGACCAA
GAAATCCCCCGAACCAGTCAGGTTTACTTACGCTGGATGTTTGAGTGTGAAGAAATACCGGCCCAAGTACTGC
GGTTCCTGCGTGGACGGCCGATGCTGCACGCCCCAGCTGACCAGGACTGTGAAGATGCGGTTCCGCTGCGAAG
ATGGGGAGACATTTTCCAAGAACGTCATGATGATCCAGTCCTGCAAATGCAACTACAACTGCCCGCATGCCAA
TGAAGCAGCGTTTCCCTTCTACAGGCTGTTCAATGACATTCACAAATTTAGGGACTAAATGCTACCTGGGTTT
CCAGGGCACACCTAGACAAACAAGGGAGAAGAGTGTCAGAATCAGAATCATGGAGAAAATGGGCGGGGGTGGT
GTGGGTGATGGGACTCATTGTAGAAAGGAAGCCTTGCTCATTCTTGAGGAGCATTAAGGTATTTCGAAACTGC
CAAGGGTGCTGGTGCGGATGGACACTAATGCAGCCACGATTGGAGAATACTTTGCTTCATAGTATTGGAGCAC
ATGTTACTGCTTCATTTTGGAGCTTGTGGAGTTGATGACTTTCTGTTTTCTGTTTGTAAATTATTTGCTAAGC
ATATTTTCTCTAGGCTTTTTTCCTTTTGGGGTTCTACAGTCGTAAAAGAGATAATAAGATTAGTTGGACAGTT
TAAAGCTTTTATTCGTCCTTTGACAAAAGTAAATGGGAGGGCATTCCATCCCTTCCTGAAGGGGGACACTCCA
TGAGTGTCTGTGAGAGGCAGCTATCTGCACTCTAAACTGCAAACAGAAATCAGGTGTTTTAAGACTGAATGTT
TTATTTATCAAAATGTAGCTTTTGGGGAGGGAGGGGAAATGTAATACTGGAATAATTTGTAAATGATTTTAAT
TTTATATTCAGTGAAAAGATTTTATTTATGGAATTAACCATTTAATAAAGAAATATTTACCT

| | | | |
|---|---|---|---|
| NOV12m, SNP13376428 of | SEQ ID NO: 174 | | MW at42011.1kD |
| CG55688-01, Protein Sequence | SNP Pos: 164 | 381 aa | SNP change: Asp to Gly |

MSSRIARALALVVTLLHLTRLALSTCPAACHCPLEAPKCAPGVGLVRDGCGCCKVCAKQLNEDCSKTQPCDHT
KGLECNFGASSTALKGICRAQSEGRPCEYNSRIYQNGESFQPNCKHQCTCIDGAVGCIPLCPQELSLPNLGCP
NPRLVKVTGQCCEEWVCGEDSIKDPMEDQDGLLGKELGFDASEVELTRNNELIAVGKGSSLKRIPVFGMEPRI
RYNPLQGQKCIVQTTSWSQCSKTCGTGISTRVTNDNPECRLVKETRICEVRPCGQPVYSSLKKGKKCSKTKKS
PEPVRFTYAGCLSVKKYRPKYCGSCVDGRCCTPQLTRTVKMRFRCEDGETFSKNVMMIQSCKCNYNCPHANEA
AFPFYRLFNDIHKFRD

[0423] A ClustalW comparison of the above protein sequences yields the following sequence alignment shown in Table 12B.

TABLE 12B
Comparison of the NOV12 protein sequences.

| | |
|---|---|
| NOV12a | -------------MSSRIARALALVVTLLHLTRLALSTCPAACHCPLEAPKCAPGVGLVR |
| NOV12b | ----------RSTMSSRIARALALVVTLLHLTRLALSTCPAACHCPLEAPKCAPGVGLVR |
| NOV12c | ------------------------------------RSCEYNSRIYQNGESFQPNCKHQC |
| NOV12d | ------------------------------------RSCPAACHCPLEAPKCAPGVGLVR |
| NOV12e | ------------------------------------RSCPAACHCPLEAPKCAPGVGLVR |
| NOV12f | YKKAGSARPPFTTMSSRIARALALVVTLLHLTRLALSTCPAACHCPLEAPKCAPGVGLVR |
| NOV12g | -----------------------------GSAAAPFTTCPAACHCPLEAPKCAPGVGLVR |
| NOV12h | -------------------------------------TCPAACHCPLEAPKCAPGVGLVR |
| NOV12i | YKKAGSAAAPFTTMSSRIARALALVVTLLHLTRLALSTCPAACHCPLEAPKCAPGVGLVR |
| NOV12j | -----------------------------GSAAAPFTTCPAACHCPLEAPKCAPGVGLVR |
| NOV12k | -------------MSSRIARALALVVTLLHLTRLALSTCPAACHCPLEAPKCAPGVGLVR |
| NOV12l | -------------MSSRIARALALVVTLLHLTRLALSTCPAACHCPLEAPKCAPGVGLVR |
| NOV12a | DGCGCCKVCAKQLNEDCSKTQPCDHTKGLECNFGASSTALKGICRAQSEGRPCEYNSRIY |
| NOV12b | DGCGCCKVCAKQLNEDCSKTQPCDHTKGLECNFGASSTALKGICRAQSEGRPCEYNSRIY |
| NOV12c | TCIDGAVGCIPLCPQELSLPNLGCPNPRLVKVTGQCCEEWVCLE---------------- |
| NOV12d | DGCGCCKVCAKQLNEDCSKTQPCDHTKGLECNFGASSTALKGICRAQSEGLE-------- |
| NOV12e | DGCGCCKVCAKQLNEDCSKTQPCDHTKGLECNFGASSTALKGICRAQSEGLE-------- |
| NOV12f | DGCGCCKVCAKQLNEDCSKTQPCDHTKGLECNFGASSTALKGICRAQSEGRPCEYNSRIY |
| NOV12g | DGCGCCKVCAKQLNEDCSKTQPCDHTKGLECNFGASSTALKGICRAQSEGRPCEYNSRIY |
| NOV12h | DGCGCCKVCAKQLNEDCSKTQPCDHTKGLECNFGASSTALKGICRAQSEGRPCEYNSRIY |
| NOV12i | DGCGCCKVCAKQLNEDCSKTQPCDHTKGLECNFGASSTALKGICRAQSEGRPCEYNSRIY |
| NOV12j | DGCGCCKVCAKQLNEDCSKTQPCDHTKGLECNFGASSTALKGICRAQSEGRPCEYNSRIY |
| NOV12k | DGCGCCKVCAKQLNEDCSKTQPCDHTKGLECNFGASSTALKGICRAQSEGRPCEYNSRIY |
| NOV12l | DGCGCCKVCAKQLNEDCSKTQPCDHTKGLECNFGASSTALKGICRAQSEGRPCEYNSRIY |
| NOV12a | QNGESFQPNCKHQCTCIDGAVGCIPLCPQELSLPNLGCPNPRLVKVTGQCCEEWVCDEDS |
| NOV12b | QNGESFQPNCKHQCTCIDGAVGCIPLCPQELSLPNLGCPNPRLVKVTGQCCEEWVCDEDS |
| NOV12c | ------------------------------------------------------------ |
| NOV12d | ------------------------------------------------------------ |
| NOV12e | ------------------------------------------------------------ |
| NOV12f | QNGESFQPNCKHQCTCIDGAVGCIPLCPQELSLPNLGCPNPRLVKVTGQCCEEWVCDEDS |
| NOV12g | QNGESFQPNCKHQCTCIDGAVGCIPLCPQELSLPNLGCPNPRLVKVTGQCCEEWVCDEDS |
| NOV12h | QNGESFQPNCKHQCTCIDGAVGCIPLCPQELSLPNLGCPNPRLVKVTGQCCEEWVCDEDS |
| NOV12i | QNGESFQPNCKHQCTCIDGAVGCIPLCPQELSLPNLGCPNPRLVKVTGQCCEEWVCDEDS |
| NOV12j | QNGESFQPNCKHQCTCIDGAVGCIPLCPQELSLPNLGCPNPRLVKVTGQCCEEWVCDEDS |
| NOV12k | QNGESFQPNCKHQCTCIDGAVGCIPLCPQELSLPNLGCPNPRLVKVTGQCCEEWVCDEDS |
| NOV12l | QNGESFQPNCKHQCTCIDGAVGCIPLCPQELSLPNLGCPNPRLVKVTGQCCEEWVCDEDS |
| NOV12a | IKDPMEDQDGLLGKELGFDASEVELTRNNELIAVGKGSSLKRIPVFGMEPRIRYNPLQGQ |
| NOV12b | IKDPMEDQDGLLGKELGFDASEVELTRNNELIAVGKGSSLKRLPVFGMEPRILYNPLQGQ |
| NOV12c | ------------------------------------------------------------ |
| NOV12d | ------------------------------------------------------------ |
| NOV12e | ------------------------------------------------------------ |
| NOV12f | IKDPMEDQDGLLGKELGFDASEVELTRNNELIAVGKGSSLKRLPVFGMEPRILYNPLQGQ |
| NOV12g | IKDPMEDQDGLLGKELGFDASEVELTRNNELIAVGKGSSLKRLPVFGMEPRILYNPLQGQ |
| NOV12h | IKDPMEDQDGLLGKELGFDASEVELTRNNELIAVGKGSSLKRLPVFGMEPRILYNPLQGQ |
| NOV12i | IKDPMEDQDGLLGKELGFDASEVELTRNNELIAVGKGSSLKRLPVFGMEPRILYNPLQGQ |
| NOV12j | IKDPMEDQDGLLGKELGFDASEVELTRNNELIAVGKGSSLKRLPVFGMEPRILYNPLQGQ |
| NOV12k | IKDPMEDQDGLLGKELGFDASEVELTRNNELIAVGKGSSLKRLPVFGMEPRILYNPLQGQ |
| NOV12l | IKDPMEDQDGLLGKELGFDASEVELTRNNELIAVGKGSSLKRLPVFGMEPRILYNPLQGQ |
| NOV12a | KCIVQTTSWSQCSKTCGTGISTRVTNDNPECRLVKETRICEVRPCGQPVYSSLKKGKKCS |
| NOV12b | KCIVQTTSWSQCSKTCGTGISTRVTNDNPECRLVKETRICEVRPCGQPVYSSLKKGKKCS |
| NOV12c | ------------------------------------------------------------ |
| NOV12d | ------------------------------------------------------------ |
| NOV12e | ------------------------------------------------------------ |
| NOV12f | KCIVQTTSWSQCSKTCGTGISTRVTNDNPECRLVKETRICEVRPCGQPVYSSLKKGKKCS |
| NOV12g | KCIVQTTSWSQCSKTCGTGISTRVTNDNPECRLVKETRICEVRPCGQPVYSSLKKGKKCS |
| NOV12h | KCIVQTTSWSQCSKTCGTGISTRVTNDNPECRLVKETRICEVRPCGQPVYSSLKKGKKCS |
| NOV12i | KCIVQTTSWSQCSKTCGTGISTRVTNDNPECRLVKETRICEVRPCGQPVYSSLKKGKKCS |
| NOV12j | KCIVQTTSWSQCSKTCGTGISTRVTNDNPECRLVKETRICEVRPCGQPVYSSLKKGKKCS |
| NOV12k | KCIVQTTSWSQCSKTCGTGISTRVTNDNPECRLVKETRICEVRPCGQPVYSSLKKGKKCS |
| NOV12l | KCIVQTTSWSQCSKTCGTGISTRVTNDNPECRLVKETRICEVRPCGQPVYSSLKKGKKCS |
| NOV12a | KTKKSPEPVRFTYAGCLSVKKYRPKYCGSCVDGRCCTPQLTRTVKMRFRCEDGETFSKNV |
| NOV12b | KTKKSPEPVRFTYAGCLSVKKYRPKYCGSCVDGRCCTPQLTRTVKMRFRCEDGETFSKNV |
| NOV12c | ------------------------------------------------------------ |
| NOV12d | ------------------------------------------------------------ |
| NOV12e | ------------------------------------------------------------ |
| NOV12f | KTKKSPEPVRFTYAGCLSVKKYRPKYCGSCVDGRCCTPQLTRTVKMRFRCEDGETFSKNV |
| NOV12g | KTKKSPEPVRFTYAGCLSVKKYRPKYCGSCVDGRCCTPQLTRTVKMRFRCEDGETFSKNV |
| NOV12h | KTKKSPEPVRFTYAGCLSVKKYRPKYCGSCVDGRCCTPQLTRTVKMRFRCEDGETFSKNV |
| NOV12i | KTKKSPEPVRFTYAGCLSVKKYRPKYCGSCVDGRCCTPQLTRTVKMRFRCEDGETFSKNV |
| NOV12j | KTKKSPEPVRFTYAGCLSVKKYRPKYCGSCVDGRCCTPQLTRTVKMRFRCEDGETFSKNV |
| NOV12k | KTKKSPEPVRFTYAGCLSVKKYRPKYCGSCVDGRCCTPQLTRTVKMRFRCEDGETFSKNV |
| NOV12l | KTKKSPEPVRFTYAGCLSVKKYRPKYCGSCVDGRCCTPQLTRTVKMRFRCEDGETFSKNV |
| NOV12a | MMIQSCKCNYNCPHANEAAFPFYRLFNDIHKFRD-------------- |
| NOV12b | MMIQSCKCNYNCPHANEAAFPFYRLFNDIHKFRDLE------------ |
| NOV12c | ------------------------------------------------ |
| NOV12d | ------------------------------------------------ |
| NOV12e | ------------------------------------------------ |
| NOV12f | MMIQSCKCNYNCPHANEAAFPFYRLFNDIHKFRDKGGRALSRVRRPRS |
| NOV12g | MMIQSCKCNYNCPHANEAAFPFYRLFNDIHKFRDKGGRA--------- |
| NOV12h | MMIQSCKCNYNCPHANEAAFPFYRLFNDIHKFR--------------- |
| NOV12i | MMIQSCKCNYNCPHANEAAFPFYRLFNDIHKFRDKGGRA--------- |
| NOV12j | MMIQSCKCNYNCPHANEAAFPFYRLFNDIHKFRDKGGRA--------- |
| NOV12k | MMIQSCKCNYNCPHANEAAFPFYRLFNDIHKFRD-------------- |
| NOV12l | MMIQSCKCNYNCPHANEAAFPFYRLFNDIHKFRD-------------- |
| NOV12a | (SEQ ID NO: 150) |
| NOV12b | (SEQ ID NO: 152) |
| NOV12c | (SEQ ID NO: 154) |
| NOV12d | (SEQ ID NO: 156) |
| NOV12e | (SEQ ID NO: 158) |
| NOV12f | (SEQ ID NO: 160) |
| NOV12g | (SEQ ID NO: 162) |
| NOV12h | (SEQ ID NO: 164) |
| NOV12i | (SEQ ID NO: 166) |
| NOV12j | (SEQ ID NO: 168) |
| NOV12k | (SEQ ID NO: 170) |
| NOV12l | (SEQ ID NO: 172) |

[0424] Further analysis of the NOV12a protein yielded the following properties shown in Table 12C.

TABLE 12C
Protein Sequence Properties NOV12a

| SignalP | Cleavage site between residues 25 and 26 | | | |
|---|---|---|---|---|
| analysis: | | | | |
| PSORT II | PSG: a new signal peptide prediction method | | | |
| analysis: | N-region: length 7; pos. chg 2; neg. chg 0 | | | |
| | H-region: length 12; peak value 10.04 | | | |
| | PSG score: 5.64 | | | |
| | GvH: von Heijne's method for signal seq. recognition | | | |
| | GvH score (threshold: −2.1): −1.17 | | | |
| | possible cleavage site: between 21 and 22 | | | |
| | >>> Seems to have a cleavable signal peptide (1 to 21) | | | |
| | ALOM: Klein et al's method for TM region allocation | | | |
| | Init position for calculation: 22 | | | |
| | Tentative number of TMS(s) for the threshold 0.5: 0 | | | |
| | number of TMS(s) . . . fixed | | | |
| | PERIPHERAL | Likelihood = 5.73 (at 124) | | |
| | ALOM score: 5.73 (number of TMSs: 0) | | | |
| | MTOP: Prediction of membrane topology (Hartmann et al.) | | | |
| | Center position for calculation: 10 | | | |
| | Charge difference: −1.0 C(2.0)-N(3.0) | | | |
| | N >= C: N-terminal side will be inside | | | |
| | MITDISC: discrimination of mitochondrial targeting seq | | | |
| | R content: | 3 | Hyd Moment(75): | 7.35 |
| | Hyd Moment(95): | 12.47 | G content: | 0 |
| | D/E content: | 1 | S/T content: | 6 |

Score: 0.47
Gavel: prediction of cleavage sites for mitochondrial preseq
R-2 motif at 57 VRD|GC
NUCDISC: discrimination of nuclear localization signals
pat4: none
pat7: none
bipartite: none
content of basic residues: 13.9%
NLS Score: −0.47
KDEL: ER retention motif in the C-terminus: none
ER Membrane Retention Signals:
XXRR-like motif in the N-terminus: SSRI
KKXX-like motif in the C-terminus: HKFR
SKL: peroxisomal targeting signal in the C-terminus: none
PTS2: 2nd peroxisomal targeting signal: none
VAC: possible vacuolar targeting motif: none
RNA-binding motif: none
Actinin-type actin-binding motif:
type 1: none
type 2: none
NMYR: N-myristoylation pattern: none
Prenylation motif: none
memYQRL: transport motif from cell surface to Golgi: none
Tyrosines in the tail: none
Dileucine motif in the tail: none
checking 63 PROSITE DNA binding motifs: none
checking 71 PROSITE ribosomal protein motifs: none
checking 33 PROSITE prokaryotic DNA binding motifs: none
NNCN: Reinhardt's method for Cytoplasmic/Nuclear discrimination
Prediction: nuclear
Reliability: 94.1
COIL: Lupas's algorithm to detect coiled-coil regions
total: 0 residues
Final Results (k = 9/23):
56.5%: mitochondrial
17.4%: extracellular, including cell wall
17.4%: nuclear
8.7%: cytoplasmic
>> prediction for CG55688-01 is mit (k = 23)

[0425] A search of the NOV12a protein against the Geneseq database, a proprietary database that contains sequences published in patents and patent publication, yielded several homologous proteins shown in Table 12D.

TABLE 12D
Geneseq Results for NOV12a

| | | NOV12a | Identities/ | |
|---|---|---|---|---|
| | | Residues/ | Similarities for | |
| Geneseq | Protein/Organism/Length [Patent #, | Match | the Matched | Expect |
| Identifier | Date] | Residues | Region | Value |
| ABG76937 | Human protein, comprising CYR61, | 1 . . . 381 | 381/381 (100%) | 0.0 |
| | designated SEC1 - Homo sapiens, 381 | 1 . . . 381 | 381/381 (100%) | |
| | aa. [WO200255705-A2, | | | |
| | 18 JUL. 2002] | | | |
| ABB05438 | Human Cyr61 protein SEQ ID NO: 2 - | 1 . . . 381 | 379/381 (99%) | 0.0 |
| | Homo sapiens, 381 aa. | 1 . . . 381 | 380/381 (99%) | |
| | [WO200198359-A2, 27 DEC. 2001] | | | |
| AAE18107 | Human connective tissue growth | 1 . . . 381 | 379/381 (99%) | 0.0 |
| | factor-2 (CTGF-2) - Homo sapiens, | 1 . . . 381 | 380/381 (99%) | |
| | 381 aa. [WO200204480-A2, | | | |
| | 17 JAN. 2002] | | | |
| AAU79761 | Human Cyr61 protein - Homo | 1 . . . 381 | 379/381 (99%) | 0.0 |
| | sapiens, 381 aa. [WO200226193-A2, | 1 . . . 381 | 380/381 (99%) | |
| | 04 APR. 2002] | | | |
| AAB90773 | Human shear stress-response protein | 1 . . . 381 | 379/381 (99%) | 0.0 |
| | SEQ ID NO: 46 - Homo sapiens, 381 | 1 . . . 381 | 380/381 (99%) | |
| | aa. [WO200125427-A1, | | | |
| | 12 APR. 2001] | | | |

[0426] In a BLAST search of public sequence databases, the NOV12a protein was found to have homology to the proteins shown in the BLASTP data in Table 12E.

TABLE 12E
Public BLASTP Results for NOV12a

| | | NOV12a | Identities/ | |
|---|---|---|---|---|
| Protein | | Residues/ | Similarities for | |
| Accession | | Match | the Matched | Expect |
| Number | Protein/Organism/Length | Residues | Portion | Value |
| O00622 | CYR61 protein precursor | 1 . . . 381 | 379/381 (99%) | 0.0 |
| | (Cysteine-rich, angiogenic inducer, 61) | 1 . . . 381 | 380/381 (99%) | |
| | (Insulin-like growth factor-binding | | | |
| | protein 10) (GIG1 protein) - Homo | | | |
| | sapiens (Human), 381 aa. | | | |
| CAC60183 | Sequence 3 from Patent WO0155210 - | 1 . . . 381 | 377/381 (98%) | 0.0 |
| | Homo sapiens (Human), 381 aa. | 1 . . . 381 | 379/381 (98%) | |
| CAD42176 | Sequence 1 from Patent EP1217067 - | 1 . . . 373 | 358/374 (95%) | 0.0 |
| | Homo sapiens (Human), 374 aa | 1 . . . 374 | 360/374 (95%) | |
| | (fragment). | | | |
| Q9ES72 | CYR61 protein precursor | 1 . . . 381 | 348/383 (90%) | 0.0 |
| | (Cysteine-rich, angiogenic inducer, 61) | 1 . . . 379 | 358/383 (92%) | |
| | (Insulin-like growth factor-binding | | | |
| | protein 10) - Rattus norvegicus (Rat), | | | |
| | 379 aa. | | | |
| P18406 | CYR61 protein precursor | 1 . . . 381 | 348/383 (90%) | 0.0 |
| | (Cysteine-rich, angiogenic inducer, 61) | 1 . . . 379 | 358/383 (92%) | |
| | (Insulin-like growth factor-binding | | | |
| | protein 10) (3CH61) - Mus musculus | | | |
| | (Mouse), 379 aa. | | | |

[0427] PFam analysis predicts that the NOV12a protein contains the domains shown in the Table 12F.

TABLE 12F
Domain Analysis of NOV12a

| | | Identities/ | |
|---|---|---|---|
| | | Similarities | |
| Pfam | | for the | Expect |
| Domain | NOV12a Match Region | Matched Region | Value |
| IGFBP | 26 . . . 97 | 32/85 (38%) | 1.4e−25 |
| | | 60/85 (71%) | |
| vwc | 100 . . . 163 | 35/85 (41%) | 2.4e−26 |
| | | 60/85 (71%) | |
| tsp_1 | 231 . . . 272 | 16/53 (30%) | 5.6e−11 |
| | | 36/53 (68%) | |
| Cys_knot | 279 . . . 376 | 25/115 (22%) | 1.5e−29 |
| | | 88/115 (77%) | |

### Example 13

[0428] The NOV13 clone was analyzed, and the nucleotide and encoded polypeptide sequences are shown in Table 13A.

TABLE 13A
NOV13 Sequence Analysis

| | | |
|---|---|---|
| NOV13a, CG56768-01 | SEQ ID NO: 175 | 1214 bp |
| DNA Sequence | ORF Start: ATG at 60 | ORF Stop: TAG at 1155 |

CTCCTTTCTTCCCTCTCCAGAAGTCCATTGGAATATTAAGCCCAGGAGTTGCTTTGGGGATGCCTGGAAGTGC
AATGTCTTCCAAGTTCTTCCTAGTGGCTTTGGCCATATTTTTCTCCTTCGCCCAGGTTGTAATTGAAGCCAAT
TCTTGGTGGTCGCTAGGTATGAATAACCCTGTTCAGATGTCAGAAGTATATATTATAGGAGCACAGCCTCTCT
GCAGCCAACTGGCAGGACTTTCTCAAGGACAGAAGAAACTGTGCCACTTGTATCAGGACCACATGCAGTACAT
CGGAGAAGGCGCGAAGACAGGCATCAAAGAATGCCAGTATCAATTCCGACATCGAAGGTGGAACTGCAGCACT
GTGGATAACACCTCTGTTTTTGGCAGGGTGATGCAGATAGGCAGCCGCGAGACGGCCTTCACATACGCGGTGA
GCGCAGCAGGGGTGGTGAACGCCATGAGCCGGGCGTGCCGCGAGGGCGAGCTGTCCACCTGCGGCTGCAGCCG
CGCCGCGCGCCCCAAGGACCTGCCGCGGGACTGGCTCTGGGGCGGCTGCGGCGACAACATCGACTATGGCTAC
CGCTTTGCCAAGGAGTTCGTGGACGCCCGCGAGCGGGAGCGCATCCACGCCAAGGGCTCCTACGAGAGTGCTC
GCATCCTCATGAACCTGCACAACAACGAGGCCGGCCGCAGGACGGTGTACAACCTGGCTGATGTGGCCTGCAA
GTGCCATGGGGTGTCCGGCTCATGTAGCCTGAAGACATGCTGGCTGCAGCTGGCAGACTTCCGCAAGGTGGGT
GATGCCCTGAAGGAGAAGTACGACAGCGCGGCGGCCATGCGGCTCAACAGCCGGGGCAAGTTGGTACAGGTCA
ACAGCCGCTTCAACTCGCCCACCACACAAGACCTGGTCTACATCGACCCCAGCCCTGACTACTGCGTGCGCAA
TGAGAGCACCGGCTCGCTGGGCACGCAGGGCCGCCTGTGCAACAAGACGTCGGAGGGCATGGATGGCTGCGAG
CTCATGTGCTGCGGCCGTGGCTACGACCAGTTCAAGACCGTGCAGACGGAGCGCTGCCACTGCAAGTTCCACT
GGTGCTGCTACGTCAAGTGCAAGAAGTGCACGGAGATCGTGGACCAGTTTGTGTGCAAGTAGTGGGTGCCACC
CAGCACTCAGCCCCGCCCCCAGGACCCGCTTATTTATAGAAAGTAC

| | | | |
|---|---|---|---|
| NOV13a, CG56768-01 | | | |
| Protein Sequence | SEQ ID NO: 176 | 365 aa | MW at 40886.3kD |

MAGSAMSSKFFLVALAIFFSFAQVVIEANSWWSLGMNNPVQMSEVYIIGAQPLCSQLAGLSQGQKKLCHLYQD
HMQYIGEGAKTGIKECQYQFRHRRWNCSTVDNTSVFGRVMQIGSRETAFTYAVSAAGVVNAMSRACREGELST
CGCSRAARPKDLPRDWLWGGCGDNIDYGYRFAKEFVDARERERIHAKGSYESARILMNLHNNEAGRRTVYNLA
DVACKCHGVSGSCSLKTCWLQLADFRKVGDALKEKYDSAAAMRLNSRGKLVQVNSRFNSPTTQDLVYIDPSPD
YCVRNESTGSLGTQGRLCNKTSEGMDGCELMCCGRGYDQFKTVQTERCHCKFHWCCYVKCKKCTEIVDQFVCK

| | | |
|---|---|---|
| NOV13b, CG56768-02 | SEQ ID NO: 177 | 1026 bp |
| DNA Sequence | ORF Start: at 7 | ORF Stop: at 1021 |

GGATCCGCCAATTCTTGGTGGTCGCTAGGTATGAATAACCCTGTTCAGATGTCAGAAGTATATATTATAGGAG
CACAGCCTCTCTGCAGCCAACTGGCAGGACTTTCTCAAGGACAGAAGAAACTGTGCCACTTGTATCAGGACCA
CATGCAGTACATCGGAGAAGGCGCGAAGACAGGCATCAAAGAATGCCAGTATCAATTCCGACATCGAAGGTGG
AACTGCAGCACTGTGGATAACACCTCTGTTTTTGGCAGGGTGATGCAGATAGGCAGCCGCGAGACGGCCTTCA
CATACGCGGTGAGCGCAGCAGGGGTGGTGAACGCCATGAGCCGGGCGTGCCGCGAGGGCGAGCTGTCCACCTG
CGGCTGCAGCCGCGCCGCGCGCCCCAAGGACCTGCCGCGGGACTGGCTCTCCCGCGGCTGCGGCGACAACATC
GACTATGGCTACCGCTTTGCCAAGGAGTTCGTGGACGCCCGCGAGCGGCAGCGCATCCACGCCAAGGGCTCCT
ACGAGAGTGCTCGCATCCTCATGAACCTGCACAACAACGAGGCCGGCCGCAGGACGGTGTACAACCTGGCTGA
TGTGGCCTGCAAGTGCCATGGGGTGTCCGGCTCATGTAGCCTGAAGACATGCTGGCTGCAGCTGGCAGACTTC
CGCAAGGTGGGTGATGCCCTGAAGGAGAAGTACGACAGCGCGGCGGCCATGCGGCTCAACAGCCGGGGCAAGT
TGGTACAGGTCAACAGCCGCTTCAACTCGCCCACCACACAAGACCTGGTCTACATCGACCCCAGCCCTGACTA
CTGCGTGCGCAATGAGAGCACCGGCTCGCTGGGCACGCAGGGCCGCCTGTGCAACAAGACGTCGGAGGGCATG
GATGGCTGCGAGCTCATGTGCTGCGGCCGTGGCTACGACCAGTTCAAGACCGTGCAGACGGAGCGCTGCCACT
GCAAGTTCCACTGGTGCTGCTACGTCAAGTGCAAGAAGTGCACGGAGATCGTGGACCAGTTTGTGTGCAAGCT
CGAG

| | | | |
|---|---|---|---|
| NOV13b, CG56768-02 | | | |
| Protein Sequence | SEQ ID NO: 178 | 338 aa | MW at 37991.8kD |

ANSWWSLGMNNPVQMSEVYIIGAQPLCSQLAGLSQGQKKLCHLYQDHMQYIGEGAKTGIKECQYQFRHRRWNC
STVDNTSVFGRVMQIGSRETAFTYAVSAAGVVNAMSRACREGELSTCGCSRAARPKDLPRDWLWGGCGDNIDY
GYRFAKEFVDARERERIHAKGSYESARILMNLHNNEAGRRTVYNLADVACKCHGVSGSCSLKTCWLQLADFRK
VGDALKEKYDSAAAMRLNSRGKLVQVNSRFNSPTTQDLVYIDPSPDYCVRNESTGSLGTQGRLCNKTSEGMDG
CELMCCGRGYDQFKTVQTERCHCKFHWCCYVKCKKCTEIVDQFVCK

| | | |
|---|---|---|
| NOV13c, CG56768-03 | SEQ ID NO: 179 | 1215 bp |
| DNA Sequence | ORF Start: at 16 | ORF Stop: TAG at 1156 |

GCTCCTTTCTTCCCTCTCCAGAAGTCCATTGGAATATTAAGCCCAGGAGTTGCTTTGGGGATGGCTGGAAGTG
CAATGTCTTCCAAGTTCTTCCTAGTGGCTTTGGCCATATTTTTCTCCTTCGCCCAGGTTGTAATTGAAGCCAA
TTCTTGGTGGTCGCTAGGTATGAATAACCCTGTTCAGATGTCAGAAGTATATATTATAGGAGCACAGCCTCTC
TGCAGCCAACTGGCAGGACTTTCTCAAGGACAGAACAAACTGTGCCACTTGTATCAGGACCACATGCAGTACA
TCGGAGAAGGCGCGAAGACAGGCATCAAAGAATGCCAGTATCAATTCCGACATCGAAGGTGGAACTGCAGCAC
TGTGGATAACACCTCTGTTTTTGGCAGGGTGATGCAGATAGGTAGCCGCGAGACGGCCTTCACATACGCGGTG
AGCGCAGCAGGGGTGGTGAACGCCATGAGCCGGGCGTGCCGCGAGGGCGAGCTGTCCACCTGCGGCTGCAGCC
GCGCCGCGCGCCCCAAGGACCTGCCGCGGGACTGGCTCTGGGGCGGCTCCGGCGCCACCAACAAAAAAGGCTA
CCGCTCCGCCAAGGAGATCGTGCACGCCCGCGAACGAGGACGCATCCACGCCAAGGGCTCCTACGAGAGTGCT
CGCATCCTCATGAACCTGCACAACAACGAGGCCGGCCGCAGGACGGTGTACAACCTGGCTGATGTGCCCTGCA
AGTGCCATGGGGTGTCCGGCTCATGTAGCCTGAAGACATGCTGGCTGCAGCTGGCAGACTTCCGCAAGGTGGG
TGATGCCCTGAAGGAGAAGTACGACAGCGCGGCGGCCATGCGGCTCAACAGCCGGGGCAAGTTGGTACAGGTC
AACAGCCGCTTCAACTCGCCCACCACACAAGACCTGGTCTACATCGACCCCAGCCCTGACTACTGCGTGCGCA
ATGAGAGCACCGGCTCGCTGGGCACGCAGGGCCGCCTGTGCAACAAGACGTCGGAGGGCATGGATGGCTGCGA
GCTCATGTGCTGCGGCCGTGGCTACGACCAGTTCAAGACCGTGCAGACGGAGCGCTGCCACTGCAAGTTCCAC
TGGTGCTGCTACGTCAAGTGCAAGAAGTGCACGGAGATCGTGGACCAGTTTGTGTGCAAGTAGTGGGTGCCAC
CCAGCACTCAGCCCCGCTCCCAGGACCCGCTTATTTATAGAAAGTAC

| | | | |
|---|---|---|---|
| NOV13c, CG56768-03 | | | |
| Protein Sequence | SEQ ID NO: 180 | 380 aa | MW at 42082.8kD |

LQKSIGILSPGVALGMAGSAMSSKFFLVALAIFFSFAQVVIEANSWWSLGMNNPVQMSEVYIIGAQPLCSQLA
GLSQGQKKLCHLYQDHMQYIGEGAKTGIKECQYQFRHRRWNCSTVDNTSVFGRVMQICSRETAFTYAVSAAGV
VNAMSRACREGELSTCGCSRAARPKDLPRDWLWGGSGATNKKGYRSAKEIVHARERGRIHAKGSYESARILMN
LHNNEAGRRTVYNLADVACKCHGVSGSCSLKTCWLQLADFRKVCDALKEKYDSAAAMRLNSRGKLVQVNSRFN
SPTTQDLVYIDPSPDYCVRNESTGSLGTQGRLCNKTSEGMDGCELMCCGRGYDQFKTVQTERCHCKFHWCCYV
KCKKCTEIVDQFVCK

[0429] A ClustalW comparison of the above protein sequences yields the following sequence alignment shown in Table 13B.

TABLE 13B
Comparison of the NOV13 protein sequences.

| | |
|---|---|
| NOV13a | ---------------MAGSAMSSKFFLVALAIFFSFAQVVIEANSWWSLGMNNPVQMSEV |
| NOV13b | ------------------------------------------ANSWWSLGMNNPVQMSEV |
| NOV13c | LQKSIGILSPGVALGMAGSAMSSKFFLVALAIFFSFAQVVIEANSWWSLGMNNPVQMSEV |
| NOV13a | YIIGAQPLCSQLAGLSQGQKKLCHLYQDHMQYIGEGAKTGIKECQYQFRHRRWNCSTVDN |
| NOV13b | YIIGAQPLCSQLAGLSQGQKKLCHLYQDHMQYIGEGAKTGIKECQYQFRHRRWNCSTVDN |
| NOV13c | YIIGAQPLCSQLAGLSQGQKKLCHLYQDHMQYIGEGAKTGIKECQYQFRHRRWNCSTVDN |
| NOV13a | TSVFGRVMQIGSRETAFTYAVSAAGVVNAMSRACREGELSTCGCSRAARPKDLPRDWLWG |
| NOV13b | TSVFGRVMQIGSRETAFTYAVSAAGVVNAMSRACREGELSTCGCSRAARPKDLPRDWLWG |
| NOV13c | TSVFGRVMQIGSRETAFTYAVSAAGVVNAMSRACREGELSTCGCSRAARPKDLPRDWLWG |
| NOV13a | GCGDNIDYGYRFAKEFVDARERERIHAKGSYESARILMNLHNNEAGRRTVYNLADVACKC |
| NOV13b | GCGDNIDYGYRFAKEFVDARERERIHAKGSYESARILMNLHNNEAGRRTVYNLADVACKC |
| NOV13c | GSGATNKKGYRSAKEIVHARERGRIHAKGSYESARILMNLHNNEAGRRTVYNLADVACKC |
| NOV13a | HGVSGSCSLKTCWLQLADFRKVGDALKEKYDSAAAMRLNSRGKLVQVNSRFNSPTTQDLV |
| NOV13b | HGVSGSCSLKTCWLQLADFRKVGDALKEKYDSAAAMRLNSRGKLVQVNSRFNSPTTQDLV |
| NOV13c | HGVSGSCSLKTCWLQLADFRKVGDALKEKYDSAAAMRLNSRGKLVQVNSRFNSPTTQDLV |
| NOV13a | YIDPSPDYCVRNESTGSLGTQGRLCNKTSEGMDGCELMCCGRGYDQFKTVQTERCHCKFH |
| NOV13b | YIDPSPDYCVRNESTGSLGTQGRLCNKTSEGMDGCELMCCGRGYDQFKTVQTERCHCKFH |
| NOV13c | YIDPSPDYCVRNESTGSLGTQGRLCNKTSEGMDGCELMCCGRGYDQFKTVQTERCHCKFH |
| NOV13a | WCCYVKCKKCTEIVDQFVCK |
| NOV13b | WCCYVKCKKCTEIVDQFVCK |
| NOV13c | WCCYVKCKKCTEIVDQFVCK |
| NOV13a | (SEQ ID NO: 176) |
| NOV13b | (SEQ ID NO: 178) |
| NOV13c | (SEQ ID NO: 180) |

[0430] Further analysis of the NOV13a protein yielded the following properties shown in Table 13C.

TABLE 13C
Protein Sequence Properties NOV13a

| SignalP | Cleavage site between residues 28 and 29 | | | |
|---|---|---|---|---|
| analysis: | | | | |
| PSORT II | PSG: a new signal peptide prediction method | | | |
| analysis: | N-region: length 9; pos.chg 1; neg.chg 0 | | | |
| | H-region: length 17; peak value 11.46 | | | |
| | PSG score: 7.06 | | | |
| | GvH: von Heijne's method for signal seq. recognition | | | |
| | GvH score (threshold: −2.1): 2.33 | | | |
| | possible cleavage site: between 22 and 23 | | | |
| | >>> Seems to have a cleavable signal peptide (1 to 22) | | | |
| | ALOM: Klein et al's method for TM region allocation | | | |
| | Init position for calculation: 23 | | | |
| | Tentative number of TMS(s) for the threshold 0.5: 0 | | | |
| | number of TMS(s) . . . fixed | | | |
| | PERIPHERAL | Likelihood = 4.51 (at 45) | | |
| | ALOM score: 4.51 (number of TMSs: 0) | | | |
| | MTOP: Prediction of membrane topology (Hartmann et al.) | | | |
| | Center position for calculation: 11 | | | |
| | Charge difference: −3.0 C(−1.0)-N(2.0) | | | |
| | N >= C: N-terminal side will be inside | | | |
| | MITDISC: discrimination of mitochondrial targeting seq | | | |
| | R content: | 0 | Hyd Moment(75): | 3.30 |
| | Hyd Moment(95): | 2.27 | G content: | 1 |
| | D/E content: | 1 | S/T content: | 4 |

Score: −5.10
Gavel: prediction of cleavage sites for mitochondrial preseq
cleavage site motif not found
NUCDISC: discrimination of nuclear localization signals
pat4: RHRR (3) at 94
pat7: none
bipartite: none
content of basic residues: 12.6%
NLS Score: −0.29
KDEL: ER retention motif in the C-terminus: none
ER Membrane Retention Signals: none
SKL: peroxisomal targeting signal in the C-terminus: none
PTS2: 2nd peroxisomal targeting signal: none
VAC: possible vacuolar targeting motif: none
RNA-binding motif: none
Actinin-type actin-binding motif:
type 1: none
type 2: none
NMYR: N-myristoylation pattern: none
Prenylation motif: none
memYQRL: transport motif from cell surface to Golgi: none
Tyrosines in the tail: none
Dileucine motif in the tail: none
checking 63 PROSITE DNA binding motifs: none
checking 71 PROSITE ribosomal protein motifs: none
checking 33 PROSITE prokaryotic DNA binding motifs: none
NNCN: Reinhardt's method for Cytoplasmic/Nuclear discrimination
Prediction: cytoplasmic
Reliability: 55.5
COIL: Lupas's algorithm to detect coiled-coil regions
total: 0 residues
Final Results (k = 9/23):
22.2%: extracellular, including cell wall
22.2%: vacuolar
22.2%: mitochondrial
22.2%: endoplasmic reticulum
11.1%: Golgi
>> prediction for CG56768-01 is exc (k = 9)

[0431] A search of the NOV13a protein against the Geneseq database, a proprietary database that contains sequences published in patents and patent publication, yielded several homologous proteins shown in Table 13D.

TABLE 13D
Geneseq Results for NOV13a

| | | NOV13a | Identities/ | |
|---|---|---|---|---|
| | | Residues/ | Similarities for | |
| Geneseq | Protein/Organism/Length [Patent #, | Match | the Matched | Expect |
| Identifier | Date] | Residues | Region | Value |
| AAE34041 | WNT-4 protein - Unidentified, 365 aa. | 1 . . . 365 | 365/365 (100%) | 0.0 |
| | [WO200290992-A2, 14 NOV. 2002] | 1 . . . 365 | 365/365 (100%) | |
| ABP58342 | Human cell growth, differentiation | 1 . . . 365 | 365/365 (100%) | 0.0 |
| | and death protein CGDD-13 - Homo | 1 . . . 365 | 365/365 (100%) | |
| | sapiens, 365 aa. [WO200297032-A2, | | | |
| | 05 DEC. 2002] | | | |
| ABU56526 | Lung cancer-associated polypeptide | 1 . . . 365 | 365/365 (100%) | 0.0 |
| | #119 - Unidentified, 365 aa. | 1 . . . 365 | 365/365 (100%) | |
| | [WO200286443-A2, 31 OCT. 2002] | | | |
| ABU55887 | Human WNT-5A protein - Homo | 1 . . . 365 | 365/365 (100%) | 0.0 |
| | sapiens, 365 aa. [WO200277204-A2, | 1 . . . 365 | 365/365 (100%) | |
| | 03 OCT. 2002] | | | |
| ABU04874 | Human expressed protein tag (EPT) | 1 . . . 365 | 365/365 (100%) | 0.0 |
| | #1540 - Homo sapiens, 365 aa. | 1 . . . 365 | 365/365 (100%) | |
| | [WO200278524-A2, 10 OCT. 2002] | | | |

[0432] In a BLAST search of public sequence databases, the NOV13a protein was found to have homology to the proteins shown in the BLASTP data in Table 13E.

TABLE 13E
Public BLASTP Results for NOV13a

| | | NOV13a | | |
|---|---|---|---|---|
| Protein | | Residues/ | Identities/ | |
| Accession | | Match | Similarities for the | Expect |
| Number | Protein/Organism/Length | Residues | Matched Portion | Value |
| P41221 | Wnt-5a protein precursor - Homo | 1 . . . 365 | 365/365 (100%) | 0.0 |
| | sapiens (Human), 365 aa. | 1 . . . 365 | 365/365 (100%) | |
| Q8VCV6 | Wnt-5a protein - Mus musculus | 2 . . . 365 | 361/364 (99%) | 0.0 |
| | (Mouse), 380 aa. | 17 . . . 380 | 362/364 (99%) | |
| Q8BMF9 | WNT-5A protein precursor - Mus | 2 . . . 365 | 360/364 (98%) | 0.0 |
| | musculus (Mouse), 380 aa. | 17 . . . 380 | 361/364 (98%) | |
| Q8BM17 | WNT-5A protein precursor - Mus | 6 . . . 365 | 358/360 (99%) | 0.0 |
| | musculus (Mouse), 360 aa. | 1 . . . 360 | 359/360 (99%) | |
| Q9QXQ7 | Wnt-5a protein precursor - Rattus | 2 . . . 365 | 358/364 (98%) | 0.0 |
| | norvegicus (Rat), 379 aa. | 17 . . . 379 | 360/364 (98%) | |

[0433] PFam analysis predicts that the NOV13a protein contains the domains shown in the Table 13F.

TABLE 13F
Domain Analysis of NOV13a

| | | Identities/ | |
|---|---|---|---|
| Pfam | | Similarities | Expect |
| Domain | NOV13a Match Region | for the Matched Region | Value |
| wnt | 53 . . . 365 | 189/352 (54%) | 2e−212 |
| | | 295/352 (84%) | |

### Example 14

[0434] The NOV14 clone was analyzed, and the nucleotide and encoded polypeptide sequences are shown in Table 14A.

TABLE 14A
NOV14 Sequence Analysis

| | | |
|---|---|---|
| NOV14a, CG57054-03 | SEQ ID NO: 181 | 1215 bp |
| DNA Sequence | ORF Start: ATG at 55 | ORF Stop: TGA at 1165 |

CCAAACCACTGGAGGTCCTGATCGATCTGCCCACCGGAGCCTCCGGGCTTCGACATGCTGGAGGAGCCCCGGC
CGCGGCCTCCGCCCTCGGGCCTCGCGGGTCTCCTGTTCCTGGCGTTGTGCAGTCGGGCTCTAAGCAATGAGAT
TCTGGGCCTGAAGTTGCCTGGCGAGCCGCCGCTGACGGCCAACACCGTGTGCTTGGCGCTGTCCGGCCTGAGC
AAGCGGCAGCTAGGCCTGTGCCTGCGCAACCCCGACGTGACGGCGTCCGCGCTTCAGGGTCTGCACATCGCGG
TCCACGAGTGTCAGCACCAGCTGCGCGACCAGCGCTGGAACTGCTCCGCGCTTGAGGGCGGCGGCCGCCTGCC
GCACCACAGCGCCATCCTCAAGCGGGCCTGGTGTAGGGGAAGGCTTGGACACCCAAATGGTTTCCGAGAAAGT
GCTTTTTCCTTCTCCATGCTGGCTGCTGGGGTCATGCACGCAGTAGCCACGGCCTGCAGCCTGGGCAAGCTGG
TGAGCTGTGGCTGTGGCTGGAAGGGCAGTGGTGAGCAGGATCGGCTGAGGGCCAAACTGCTGCAGCTGCAGGC
ACTGTCCCGAGGCAAGAGTTTCCCCCACTCTCTGCCCAGCCCTGGCCCTGGCTCAAGCCCCAGCCCTCGCCCC
CAGGACACATGGGAATGGGGTGGCTGTAACCATGACATGGACTTTGGAGAGAAGTTCTCTCGGGATTTCTTGG
ATTCCAGGGAAGCTCCCCGGGACATCCAGGCACGAATGCGAATCCACAACAACAGGGTGGGGCGCCAGGTGGT
AACTGAAAACCTGAAGCGGAAATGCAAGTGTCATGGCACATCTGGCAGCTGCCAGTTCAAGACAAATTCTGGA
GCCTTCCAGCCCCGTCTGCGTCCCCGTCGCCTCTCAGGAGAGCTGGTCTACTTTGAGAAGTCTCCTGACTTCT
GTGAGCGAGACCCCACTATGGGCTCCCCAGGGACAAGGGGCCGGGCCTGCAACAAGACCAGCCGCCTGTTGGA
TGGCTGTGGCAGCCTGTGCTGTGGCCGTGGGCACAACGTGCTCCGGCAGACACGAGTTGAGCGCTGCCATTGC
CGCTTCCACTGGTGCTGCTATGTCCTGTGTGATGAGTGCAAGGTTACAGAGTGGGTGAATGTGTGTAAGTGAG
GGTCAGCCTTACCTTGGGGCTGGGGAAGAGGACTGTGTGAGAGGGGT

| | | | |
|---|---|---|---|
| NOV14a, CG57054-03 | | | |
| Protein Sequence | SEQ ID NO: 182 | 370 aa | MW at 40782.4kD |

MLEEPRPRPPPSGLAGLLFLALCSRALSNEILGLKLPGEPPLTANTVCLALSGLSKRQLGLCLRNPDVTASAL
QGLHIAVHECQHQLRDQRWNCSALEGGGRLPHHSAILKRAWCRGRLGHPNGFRESAFSFSMLAAGVMHAVATA
CSLGKLVSCGCGWKGSGEQDRLRAKLLQLQALSRGKSFPHSLPSPGPGSSPSPGPQDTWEWGGCNHDMDFGEK
FSRDFLDSREAPRDIQARMRIHNNRVGRQVVTENLKRKCKCHGTSGSCQFKTNSGAFQPRLRPRRLSGELVYF
EKSPDFCERDPTMGSPGTRGRACNKTSRLLDGCGSLCCGRGHNVLRQTRVERCHCRFHWCCYVLCDECKVTEW

| | | |
|---|---|---|
| NOV14b, CG57054-01 | SEQ ID NO: 183 | 1091 bp |
| DNA Sequence | ORF Start: at 3 | ORF Stop: TGA at 1038 |

CCAACACCGTGTGCTTGACGCTGTCCGGCCTGAGCAAGCGGCAGCTAGGCCTGTGCCTGCGCAACCCCGACGT
GACCGCGTCCGCGCTTCAGGGTCTGCACATCGCGGTCCACGAGTGTCAGCACCAGCTGCGCGACCAGCGCTGG
AACTGCTCCGCGCTTGAGGGCGGCGGCCGCCTGCCGCACCACAGCGCCATCCTCAAGCGCGGTTTCCGAGAAA
GTGCTTTTTCCTTCTCCATGCTGGCTGCTGGGGTCATGCACGCAGTAGCCACGGCCTGCGGCCTGGGCAAGCT
GGTGAGCTGTGGCTGTGGCTGGAAGGGCAGTGGTGAGCAGGATCGGCTGAGGCCCAAACTGCTGCAGCTGCAG
GCACTGTCCCGAGGCAAGAGTTTCCCCCACTCTCTGCCCAGCCCTGGCCCTGGCTCAAGCCCCAGCCCTGGCC
CCCAGGACACATGGCAATGGGGTGGCTGTAACCATCACATGGACTTTGGAGAGAAGTTCTCTCGGGATTTCTT
GGATTCCAGGGAAGCTCCCCGGGACATCCAGGCACGAATGCGAATCCACAACAACAGGGTGGGGCGCCAGGTG
GTAACTGAAAACCTGAAGCGGAAATGCAAGTGTCATGGCACATCAGGCAGCTGCCAGTTCAAGACATGCTCGA
GGGCGGCCCCAGAGTTCCGGGCAGTGGGGGCGGCGTTGAGGGAGCGGCTGGGCCGGGCCATCTTCATTGATAC
CCACAACCGCAATTCTGGAGCCTTCCAGCCCCGTCTGCGTCCCCGTCGCCTCTCAGGAGAGCTGGTCTACTTT
GAGAAGTCTCCTGACTTCTGTGAGCGAGACCCCACTATGGGCTCCCCAGGGACAAGGGGCCGGGCCTGCAACA
AGACCAGCCGCCTGTTGGATGGCTCTGGCAGCCTGTGCTGTGGCCGTGGGCATAACGTGCTCCGGCAGACACG
AGTTGAGCGCTGCCATTGCCGCTTCCACTGGTGCTGCTATCTGCTGTGTGATGAGTGCAAGGTTACAGAGTGG
GTGAATGTGTGTAAGTGAGGGTCAGCCTTAGCCTTGGGGGCTGGGGAAGAGGACTGTGTGAGAGGGGCG

| | | | |
|---|---|---|---|
| NOV14b, CG57054-01 | | | |
| Protein Sequence | SEQ ID NO: 184 | 345 aa | MW at 38351.4kD |

NTVCLTLSGLSKRQLGLCLRNPDVTASALQGLHIAVHECQHQLRDQRWNCSALEGGGRLPHHSAILKRGFRES
AFSFSMLAAGVMHAVATACGLGKLVSCGCGWKGSGEQDRLRAKLLQLQALSRGKSFPHSLPSPGPGSSPSPGP
QDTWEWGGCNHDMDFGEKFSRDFLDSREAPRDIQARMRIHNNRVGRQVVTENLKRKCKCHGTSGSCQFKTCWR
AAPEFRAVGAALRERLGRAIFIDTHNRNSGAFQPRLRPRRLSGELVYFEKSPDFCERDPTMGSPGTRGRACNK
TSRLLDGCGSLCCGRGHNVLRQTRVERCHCRFHWCCYVLCDECKVTEWVNVCK

| | | |
|---|---|---|
| NOV14c, CG57054-02 | SEQ ID NO: 185 | 1317 bp |
| DNA Sequence | ORF Start: ATG at 55 | ORF Stop: TGA at 1222 |

CCAAACCACTGGAGGTCCTGATCGATCTGCCCACCGGAGCCTCCGGGCTTCGACATGCTGGAGGAGCCCCGGC
CGCGGCCTCCGCCCTCGGGCCTCGCGGGTCTCCTGTTCCTGGCGTTGTGCAGTCGGGCTCTAAGCAATGAGAT
TCTGGGCCTGAAGTTGCCTGGCGAGCCGCCGCTGACGGCCAACACCGTGTGCTTGACGCTGTCCGGCCTGAGC
AAGCGGCAGCTAGGCCTGTGCCTGCGCAACCCCGACGTGACGGCGTCCGCGCTTCAGGGTCTGCACATCGCGG
TCCACGAGTGTCAGCACCAGCTGCGCGACCAGCGCTGGAACTGCTCCGCGCTTGAGGGCGGCGGCCGCCTGCC
GCACCACAGCGCCATCCTCAAGCGCGGTTTCCGAGAAAGTGCTTTTTCCTTCTCCATGCTGGCTGCTGGGGTC
ATGCACGCAGTAGCCACGGCCTGCAGCCTGGGCAAGCTGGTCAGCTGTGGCTGTGGCTGCAAGOGCAGTGGTG
AGCAGGATCCGCTGAGGGCCAAACTGCTGCAGCTGCAGGCACTGTCCCCAGGCAAGAGTTTCCCCCACTCTCT
GCCCAGCCCTGGCCCTGGCTCAAGCCCCAGCCCTGGCCCCCAGGACACATGGGAATGGGGTGGCTGTAACCAT
GACATGGACTTTGGAGAGAAGTTCTCTCGGGATTTCTTGGATTCCAGGGAAGCTCCCCGGGACATCCAGGCAC
GAATGCGAATCCACAACAACAGGGTGGGGCGCCAGGTGGTAACTGAAAACCTGAAGCGGAAATGCAAGTGTCA
TGGCACATCACGCAGCTGCCAGTTCAAGACATGCTGGAGGGCGGCCCCAGAGTTCCGGGCAGTGGGGGCGGCG
TTGAGGGAGCGGCTGGGCCGGGCCATCTTCATTGATACCCACAACCGCAATTCTGGAGCCTTCCAGCCCCGTC
TGCGTCCCCGTCGCCTCTCAGGAGAGCTGGTCTACTTTGAGAAGTCTCCTGACTTCTGTGAGCGAGACCCCAC
TATGGGCTCCCCAGGGACAAGGGGCCGGGCCTGCAACAAGACCAGCCGCCTGTTGGATCGCTGTGGCAGCCTG
TGCTGTGCCCGTGGGCACAACGTGCTCCGGCAGACACGAGTTGAGCGCTGCCATTGCCGCTTCCACTGGTGCT
GCTATGTGCTGTGTGATGAGTGCAAGGTTACAGAGTGGGTGAATGTGTGTAAGTGAGGGTCAGCCTTACCTTG
GGGGCTGGGGAAGAGGACTCTGTGAGAGGGGCGCCTTTTCAGCCCTTTGCTCTGATTTCCTTCCAAGGTCACT
CTT

| | | | |
|---|---|---|---|
| NOV14c, CG57054-02 | | | |
| Protein Sequence | SEQ ID NO: 186 | 389 aa | MW at 42999.9kD |

MLEEPRPRPPPSGLAGLLFLALCSRALSNEILGLKLPGEPPLTANTVCLTLSGLSKRQLGLCLRNPDVTASAL
QGLHIAVHECQHQLRDQRWNCSALEGGGRLPHHSAILKRGFRESAFSFSMLAAGVMHAVATACSLGKLVSCGC
GWKGSGEQDRLRAKLLQLQALSRGKSFPHSLPSPGPGSSPSPGPQDTWEWGGCNHDMDFCEKFSRDFLDSREA
PRDIQARMRIHNNRVGRQVVTENLKRKCKCHGTSGSCQFKTCWRAAPEFRAVGAALRERLGRAIFIDTHNRNS
GAFQPRLRPRRLSGELVYFEKSPDFCERDPTMGSPGTRGRACNKTSRLLDGCGSLCCGRGHNVLRQTRVERCH
CRFHWCCYVLCDECKVTEWVNVCK

[0435] A ClustalW comparison of the above protein sequences yields the following sequence alignment shown in Table 14B.

TABLE 14B
Comparison of the NOV14 protein sequences.

| | |
|---|---|
| NOV14a | MLEEPRPRPPPSGLAGLLFLALCSRALSNEILGLKLPGEPPLTANTVCLALSGLSKRQLG |
| NOV14b | --------------------------------------------NTVCLTLSGLSKRQLG |
| NOV14c | MLEEPRPRPPPSGLAGLLFLALCSRALSNEILGLKLPGEPPLTANTVCLTLSGLSKRQLG |
| NOV14a | LCLRNPDVTASALQGLHIAVHECQHQLRDQRWNCSALEGGGRLPHHSAILKRAWCRGRLG |
| NOV14b | LCLRNPDVTASALQCLHIAVHECQHQLRDQRWNCSALEGGGRLPHHSAILKR----G--- |
| NOV14c | LCLRNPDVTASALQGLHIAVHECQHQLRDQRWNCSALEGGGRLPHHSAILKR----G--- |
| NOV14a | HPNGFRESAFSFSMLAAGVMHAVATACSLGKLVSCGCGWKGSGEQDRLRAKLLQLQALSR |
| NOV14b | ----FRESAFSFSMLAAGVMHAVATACGLGKLVSCGCGWKGSGEQDRLRAKLLQLQALSR |
| NOV14c | ----FRESAFSFSMLAAGVMHAVATACSLGKLVSCGCGWKGSGEQDRLRAKLLQLQALSR |
| NOV14a | GKSFPHSLPSPGPGSSPSPGPQDTWEWGGCNHDMDFGEKFSRDFLDSREAPRDIQARMRI |
| NOV14b | GKSFPHSLPSPGPGSSPSPGPQDTWEWGGCNHDMDFGEKFSRDFLDSREAPRDIQARMRI |
| NOV14c | GKSFPHSLPSPGPGSSPSPGPQDTWEWGGCNHDMDFGEKFSRDFLDSREAPRDIQARMRI |
| NOV14a | HNNRVGRQVVTENLKRKCKCHGTSGSCQFKT----------------------------- |
| NOV14b | HNNRVGRQVVTENLKRKCKCHGTSGSCQFKTCWRAAPEFRAVGAALRERLGRAIFIDTHN |
| NOV14c | HNNRVGRQVVTENLKRKCKCHGTSGSCQFKTCWRAAPEFRAVGAALRERLGRAIFIDTHN |
| NOV14a | -NSGAFQPRLRPRRLSGELVYFEKSPDFCERDPTMGSPGTRGRACNKTSRLLDGCGSLCC |
| NOV14b | RNSGAFQPRLRPRRLSGELVYFEKSPDFCERDPTMGSPGTRGRACNKTSRLLDGCGSLCC |
| NOV14c | RNSGAFQPRLRPRRLSGELVYFEKSPDFCERDPTMGSPGTRGRACNKTSRLLDGCGSLCC |
| NOV14a | GRGHNVLRQTRVERCHCRFHWCCYVLCDECKVTEWVNVCK |
| NOV14b | GRGHNVLRQTRVERCHCRFHWCCYVLCDECKVTEWVNVCK |
| NOV14c | GRGHNVLRQTRVERCHCRFHWCCYVLCDECKVTEWVNVCK |
| NOV14a | (SEQ ID NO: 182) |
| NOV14b | (SEQ ID NO: 184) |
| NOV14c | (SEQ ID NO: 186) |

[0436] Further analysis of the NOV14a protein yielded the following properties shown in Table 14C.

TABLE 14C
Protein Sequence Properties NOV14a

| SignalP | | | | |
|---|---|---|---|---|
| analysis: | Cleavage site between residues 29 and 30 | | | |
| PSORT II | PSG: a new signal peptide prediction method | | | |
| analysis: | N-region: length 8; pos. chg 2; neg. chg 2 | | | |
| | H-region: length 16; peak value 10.20 | | | |
| | PSG score: 5.80 | | | |
| | GvH: von Heijne's method for signal seq. recognition | | | |
| | GvH score (threshold: −2.1): 2.10 | | | |
| | possible cleavage site: between 28 and 29 | | | |
| | >>> Seems to have a cleavable signal peptide (1 to 28) | | | |
| | ALOM: Klein et al's method for TM region allocation | | | |
| | Init position for calculation: 29 | | | |
| | Tentative number of TMS(s) for the threshold 0.5: 0 | | | |
| | number of TMS(s) . . . fixed | | | |
| | PERIPHERAL | Likelihood = 0.58 (at 134) | | |
| | ALOM score: 0.58 (number of TMSs: 0) | | | |
| | MTOP: Prediction of membrane topology (Hartmann et al.) | | | |
| | Center position for calculation: 14 | | | |
| | Charge difference: −1.0 C(0.0)-N(1.0) | | | |
| | N >= C: N-terminal side will be inside | | | |
| | MITDISC: discrimination of mitochondrial targeting seq | | | |
| | R content: | 0 | Hyd Moment(75): | 9.19 |
| | Hyd Moment(95): | 7.93 | G content: | 0 |
| | D/E content: | 2 | S/T content: | 0 |

Score: −6.41
Gavel: prediction of cleavage sites for mitochondrial preseq
cleavage site motif not found
NUCDISC: discrimination of nuclear localization signals
pat4: RPRR (4) at 281
pat7: PRLRPRR (3) at 278
bipartite: none
content of basic residues: 14.1%
NLS Score: 0.04
KDEL: ER retention motif in the C-terminus: none
ER Membrane Retention Signals: none
SKL: peroxisomal targeting signal in the C-terminus: none
PTS2: 2nd peroxisomal targeting signal: found
RLRAKLLQL at 167
VAC: possible vacuolar targeting motif: none
RNA-binding motif: none
Actinin-type actin-binding motif:
type 1: none
type 2: none
NMYR: N-myristoylation pattern: none
Prenylation motif: none
memYQRL: transport motif from cell surface to Golgi: none
Tyrosines in the tail: none
Dileucine motif in the tail: none
checking 63 PROSITE DNA binding motifs: none
checking 71 PROSITE ribosomal protein motifs: none
checking 33 PROSITE prokaryotic DNA binding motifs: none
NNCN: Reinhardt's method for Cytoplasmic/Nuclear discrimination
Prediction: nuclear
Reliability: 89
COIL: Lupas's algorithm to detect coiled-coil regions
total: 0 residues
Final Results (k = 9/23):
65.2%: nuclear
17.4%: mitochondrial
13.0%: extracellular, including cell wall
4.3%: cytoplasmic
>> prediction for CG57054-03 is nuc (k = 23)

[0437] A search of the NOV14a protein against the Geneseq database, a proprietary database that contains sequences published in patents and patent publication, yielded several homologous proteins shown in Table 14D.

TABLE 14D
Geneseq Results for NOV14a

| | | NOV14a | Identities/ | |
|---|---|---|---|---|
| | | Residues/ | Similarities for | |
| Geneseq | Protein/Organism/Length [Patent | Match | the Matched | Expect |
| Identifier | #, Date] | Residues | Region | Value |
| AAE34046 | WNT-10B protein - Unidentified, | 1 . . . 370 | 357/400 (89%) | 0.0 |
| | 389 aa. [WO200290992-A2, | 1 . . . 389 | 357/400 (89%) | |
| | 14 NOV. 2002] | | | |
| ABU55892 | Human WNT-10B protein - Homo | 1 . . . 370 | 357/400 (89%) | 0.0 |
| | sapiens, 389 aa. [WO200277204-A2, | 1 . . . 389 | 357/400 (89%) | |
| | 03 OCT. 2002] | | | |
| AAW08928 | Wnt-10b protein - Homo sapiens, | 1 . . . 370 | 355/400 (88%) | 0.0 |
| | 389 aa. [WO9640910-A1, | 1 . . . 389 | 355/400 (88%) | |
| | 19 DEC. 1996] | | | |
| AAR53689 | HR2 polypeptide - Homo sapiens, | 1 . . . 370 | 348/400 (87%) | 0.0 |
| | 389 aa. [WO9411510-A2, | 1 . . . 389 | 351/400 (87%) | |
| | 26 MAY 1994] | | | |
| AAY28559 | Wnt-10a polypeptide #1 -Homo | 5 . . . 370 | 224/415 (53%) | e−128 |
| | sapiens, 417 aa. [WO9938966-A1, | 14 . . . 417 | 276/415 (65%) | |
| | 05 AUG. 1999] | | | |

[0438] In a BLAST search of public sequence databases, the NOV14a protein was found to have homology to the proteins shown in the BLASTP data in Table 14E.

TABLE 14E
Public BLASTP Results for NOV14a

| | | NOV14a | Identities/ | |
|---|---|---|---|---|
| Protein | | Residues/ | Similarities for | |
| Accession | | Match | the Matched | Expect |
| Number | Protein/Organism/Length | Residues | Portion | Value |
| O00744 | Wnt-10b protein precursor (Wnt-12) - | 1 . . . 370 | 358/400 (89%) | 0.0 |
| | Homo sapiens (Human), 389 aa. | 1 . . . 389 | 358/400 (89%) | |
| P48614 | Wnt-10b protein precursor (Wnt-12) - | 1 . . . 370 | 348/400 (87%) | 0.0 |
| | Mus musculus (Mouse), 389 aa. | 1 . . . 389 | 351/400 (87%) | |
| Q9GZT5 | Wnt-10a protein precursor - Homo | 5 . . . 370 | 224/415 (53%) | e−128 |
| | sapiens (Human), 417 aa. | 14 . . . 417 | 276/415 (65%) | |
| JC7693 | soluble-type glycoprotein WNT10A - | 5 . . . 370 | 223/415 (53%) | e−127 |
| | human, 417 aa. | 14 . . . 417 | 275/415 (65%) | |
| P43446 | Wnt-10a protein precursor - | 22 . . . 370 | 210/384 (54%) | e−122 |
| | Brachydanio rerio (Zebrafish) (Danio | 72 . . . 442 | 270/384 (69%) | |
| | rerio), 442 aa. | | | |

[0439] PFam analysis predicts that the NOV14a protein contains the domains shown in the Table 14F.

TABLE 14F
Domain Analysis of NOV14a

| | | Identities/ | |
|---|---|---|---|
| Pfam | NOV14a | Similarities | |
| Domain | Match Region | for the Matched Region | Expect Value |
| wnt | 47 . . . 370 | 150/384 (39%) | 3.3e−117 |
| | | 266/384 (69%) | |

### Example 15

[0440] The NOV15 clone was analyzed, and the nucleotide and encoded polypeptide sequences are shown in Table 15A.

TABLE 15A
NOV15 Sequence Analysis

| | | |
|---|---|---|
| NOV15a, CG57431-03 | SEQ ID NO: 187 | 651 bp |
| DNA Sequence | ORF Start: ATG at 10 | ORF Stop: TAG at 445 |

ACCGCCGCTATGGTCTCCGTGCCTACCACCTGGTGCTCCGTTGCGCTAGCCCTGCTCGTGGCCCTGCATGAAG
GGAAGGGCCAGGCTGCTGCCACCCTGGAGCAGCCAGCGTCCTCATCTCATGCCCAAGGCACCCACCTTCGGCT
TCGCCGTTGCTCCTGCAGCTCCTGGCTCGACAAGGAGTGCGTCTACTTCTGCCACTTGGACATCATCTGGGTG
AACACTCCTGAACAGACAGCTCCTTACGGCCTGGGAAACCCGCCAAGACGCCGGCGCCGCTCCCTGCCAAGGC
GCTGTCAGTGCTCCAGTGCCAGGGACCCCACCTGTGCCACCTTCTGCCTTCGAAGGCCCTGGGACATTTCCAC
AGTCAAGAGCCTCTTTGCCAAGCGACAACAGGAGGCCATGCGGGAGCCTCGGTCCACACATTCCAGGTGGAGG
AAGAGATAGTGTCGTGAGCTGGAGGAACATTGGGAAGGAAGCCCGCGGGGAGAGAGGAGGAGAGAAGTGGCCA
GGGCTTGTGGACTCTCTGCCTGCTTCCTGGACCGGGGCCTTGGTCCCAGACAGCTGGACCCATTTGCCAGGAT
TGGCACAGGCTCCCTGGTGAGGGAGCCTCGTCCAAGGCACTTCTGTGTCCTCGCACTGCCCAGGGAA

| | | | |
|---|---|---|---|
| NOV15a, CG57431-03 | | | |
| Protein Sequence | SEQ ID NO: 188 | 145 aa | MW at 16563.8kD |

MVSVPTTWCSVALALLVALHEGKGQAAATLEQPASSSHAQGTHLRLRRCSCSSWLDKECVYFCHLDIIWVNTP
EQTAPYGLGNPPRRRRRSLPRRCQCSSARDPTCATFCLRRPWDISTVKSLFAKRQQEAMREPRSTHSRWRKR

| | | |
|---|---|---|
| NOV15b, CG57431-02 | SEQ ID NO: 189 | 556 bp |
| DNA Sequence | ORF Start: ATG at 11 | ORF Stop: TAG at 545 |

TACCGCCGCTATGGTTTCCGTGCCTAGCACCTGGTGCTCCGTTGCGCTAGCCCTGCTCGTGGCCCTGCATGAA
GGGAAGGGCCAGGCTGCTGCCACCCTGGAGCAGCCAGCGTCCTCATCTCATGCCCAAGGCACCCACCTTCGGC
TTCGCCGTTGCTCCTGCAGCTCCTGGCTCGACAAGGAGTGCGTCTACTTCTGCCACTTGGACATCATCTGGGT
GAACACTCCTGAACAGACAGCTCCTTACGGCCTGGGAAACCCGCCAAGACGCCGGCGCCGCTCCCTGCCAAGG
CGCTGTCAGTGCTCCAGTGCCAGGGACCCCGCCTGTGCCACCTTCTGCCTTCGAAGGCCCTGGACTGAAGCCG
GGGCAGTCCCAAGCCGGAAGTCCCCTGCAGACGTGTTCCAGACTGGCAAGACAGGGGCCACTACAGGAGAGCT
TCTCCAAAGGCTGAGGGACATTTCCACAGTCAAGAGCCTCTTTGCCAAGCGACAACAGGAGGCCATGCGGGAG
CCTCGGTCCACACATTCCAGGTGGAAGGAGAGATAGTGTCGTGAA

| | | | |
|---|---|---|---|
| NOV15b, CG57431-02 | | | |
| Protein Sequence | SEQ ID NO: 190 | 178 aa | MW at 19918.5kD |

MVSVPSTWCSVALALLVALHEGKGQAAATLEQPASSSHAQGTHLRLRRCSCSSWLDKECVYFCHLDIIWVNTP
EQTAPYGLGNPPRRRRRSLPRRCQCSSARDPACATFCLRRPWTEAGAVPSRKSPADVFQTGKTGATTGELLQR
LRDISTVKSLFAKRQQEAMREPRSTHSRWKER

| | | |
|---|---|---|
| NOV15c, CG57431-01 | SEQ ID NO: 191 | 668 bp |
| DNA Sequence | ORF Start: ATG at 40 | ORF Stop: TAG at 574 |

CTCCCTGCTCCAGTCCAGCCTGCGCGCTCCACCGCCGCTATGGTTTCCGTGCCTACCACCTGGTGCTCCGTTG
CGCTAGCCCTGCTCGTGGCCCTGCATGAAGGGAAGGGCCAGGCTGCTGCCACCCTGGAGCAGCCAGCGTCCTC
ATCTCATGCCCAAGGCACCCACCTTCGGCTTCGCCGTTGCTCCTGCAGCTCCTGGCTCGACAAGGAGTGCGTC
TACTTCTGCCACTTGGACATCATCTGGGTGAACACTCCTGAACAGACAGCTCCTTACGGCCTGGGAAACCCGC
CAAGACGCCGGCGCCGCTCCCTGCCAAGGCGCTGTCAGTGCTCCAGTGCCAGGGACCCCGCCTGTGCCACCTT
CTGCCTTCGAAGGCCCTGGACTGAAGCCGGGGCAGTCCCAACCCGGAAGTCCCCTGCAGACGTGTTCCAGACT
GGCAAGACAGGGGCCACTACAGGAGAGCTTCTCCAAAGGCTGAGGGACATTTCCACAGTCAAGAGCCTCTTTG
CCAAGCGACAACAGGAGGCCATGCGGGAGCCTCGGTCCACACATTCCAGGTGGAGGAAGAGATAGTGTCGTGA
GCTGGAGGAACATTGGGAAGGAAGCCCGCGGGGAGAGAGGAGGAGAGAAGTGGCCAGGGCTTGTGGACTCTCC
TGCTGCTTTCT

| | | | |
|---|---|---|---|
| NOV15c, CG5743 1-01 | | | |
| Protein Sequence | SEQ ID NO: 192 | 178 aa | MW at 19945.6kD |

MVSVPSTWCSVALALLVALHEGKGQAAATLEQPASSSHAQGTHLRLRRCSCSSWLDKECVYFCHLDIIWVNTP
EQTAPYGLGNPPRRRRRSLPRRCQCSSARDPACATFCLRRPWTEAGAVPSRKSPADVFQTGKTGATTGELLQR
LRDISTVKSLFAKRQQEAMREPRSTHSRWRKR

| | | |
|---|---|---|
| NOV15d, CG57431-04 | SEQ ID NO: 193 | 964 bp |
| DNA Sequence | ORF Start: ATG at 10 | ORF Stop: TAG at 322 |

ACCGCCGCTATGGTCTCCGTGCCTACCACCTGGTGCTCCGTTGCGCTAGCCCTGCTCGTGGCCCTGCATCAAG
GGAAGGGCCAGGCTGCTGCCACCCTGGAGCAGCCAGCGTCCTCATCTCATGCCCAAGGCACCCACCTTCGGCT
TCGCCGTTGCTCCTGCAGCTCCTGGCTCGACAAGGAGTGCGTCTACTTCTGCCACTTGGACATCATCTGGGTG
AACACTCCTGACGACATTTCCACAGTCAAGAGCCTCTTTGCCAAGCCACAACAGGAGGCCATGCGGGAGCCTC
GGTCCACACATTCCAGGTGGAGGAAGAGATAGTGTCGTGAGCTGGAGGAACATTGGGAAGGAAGCCCGCGGGG
AGAGAGGAGGAGAGAAGTGGCCGGGGCTTGTGGACTCTCTGCCTGCTTCCTGGACCGGGGCCTTGGTCCCAGA
CAGCTGGACCCATTTGCCAGGATTGGCACAAGCTCCCTGGTGAGGGAGCCTCGTCCAAGGCAGTTCTGTGTCC
TCGCACTGCCCAGGGAAGCCCTCGGCCTCCAGACTGCGGAGCAGCCTCCAGTGCTGGCTGCTGGCCCACAGCT
CTGCTGGAAGAACTGCATGGGGAGTACATTCATCTGGAGGCTGCGTCCTGAGGAGTGTCCTGTCTGCTGGGCT
ACAAACCAGGAGCGACCGTGCAGCCACGAACACGCATGCCTCAGCCAGCCCCGGAGGCTGGATGGCTCCCCTG
AGGCTGGCATCCTGGCTGGCTGTGTCCTCTCCAGCTTTCCCTCCCCAGAGTTCTTGCACCCTCATTCCCTCGG
GACCCTCCCAGTGAGAAGGGCCTGCTCTGCTTTTCCTGTCTGTATATAACTTATTTGCCCTAAGAACTTTGAG
AATCCCAATTATTTATTTTAATGTATTTTTTAGACCCTCTATTTACCTGCGAACTTGTGTTTATAATAAATGA
GGAAACAGAAAAAAA

| | | | |
|---|---|---|---|
| NOV15d, CG57431-04 | | | |
| Protein Sequence | SEQ ID NO: 194 | 104 aa | MW at 11793.4kD |

MVSVPTTWCSVALALLVALHEGKGQAAATLEQPASSSHAQGTHLRLRRCSCSSWLDKECVYFCHLDIIWVNTP
EDISTVKSLFAKRQQEAMREPRSTHSRWRKR

[0441] A ClustalW comparison of the above protein sequences yields the following sequence alignment shown in Table 15B.

TABLE 15B
Comparison of the NOV15 protein sequences.

| | |
|---|---|
| NOV15a | MVSVPTTWCSVALALLVALHEGKGQAAATLEQPASSSHAQGTHLRLRRCSCSSWLDKECV |
| NOV15b | MVSVPSTWCSVALALLVALHEGKGQAAATLEQPASSSHAQGTHLRLRRCSCSSWLDKECV |
| NOV15c | MVSVPSTWCSVALALLVALHEGKGQAAATLEQPASSSHAQGTHLRLRRCSCSSWLDKECV |
| NOV15d | MVSVPTTWCSVALALLVALHEGKGQAAATLEQPASSSHAQGTHLRLRRCSCSSWLDKECV |
| NOV15a | YFCHLDIIWVNTPEQTAPYGLGNPPRRRRR------------------------------ |
| NOV15b | YFCHLDIIWVNTPEQTAPYGLGNPPRRRRRSLPRRCQCSSARDPACATFCLRRPWTEAGA |
| NOV15c | YFCHLDIIWVNTPEQTAPYGLGNPPRRRRRSLPRRCQCSSARDPACATFCLRRPWTEAGA |
| NOV15d | YFCHLDIIWVNT------------------------------------------------ |
| NOV15a | ---SLPRRCQCSSARDPTCATFCLRRPWDISTVKSLFAKRQQEAMREPRSTHSRWRKR |
| NOV15b | VPSRKSPADVFQTGKTGATTGELLQRLRDISTVKSLFAKRQQEAMREPRSTHSRWKER |
| NOV15c | VPSRKSPADVFQTGKTGATTGELLQRLRDISTVKSLFAKRQQEAMREPRSTHSRWRKR |
| NOV15d | --------------------------PEDISTVKSLFAKRQQEAMREPRSTHSRWRKR |
| NOV15a | (SEQ ID NO: 188) |
| NOV15b | (SEQ ID NO: 190) |
| NOV15c | (SEQ ID NO: 192) |
| NOV15d | (SEQ ID NO: 194) |

[0442] Further analysis of the NOV15a protein yielded the following properties shown in Table 15C.

TABLE 15C
Protein Sequence Properties NOV15a

| SignalP | Cleavage site between residues 25 and 26 | | | |
|---|---|---|---|---|
| analysis: | | | | |
| PSORT II | PSG: a new signal peptide prediction method | | | |
| analysis: | N-region: length 0; pos. chg 0; neg. chg 0 | | | |
| | H-region: length 20; peak value 9.73 | | | |
| | PSG score: 5.33 | | | |
| | GvH: von Heijne's method for signal seq. recognition | | | |
| | GvH score (threshold: −2.1): −1.24 | | | |
| | possible cleavage site: between 24 and 25 | | | |
| | >>> Seems to have a cleavable signal peptide (1 to 24) | | | |
| | ALOM: Klein et al's method for TM region allocation | | | |
| | Init position for calculation: 25 | | | |
| | Tentative number of TMS(s) for the threshold 0.5: 0 | | | |
| | number of TMS(s) . . . fixed | | | |
| | PERIPHERAL | Likelihood = 7.85 (at 54) | | |
| | ALOM score: 7.85 (number of TMSs: 0) | | | |
| | MTOP: Prediction of membrane topology (Hartmann et al.) | | | |
| | Center position for calculation: 12 | | | |
| | Charge difference: −1.5 C(−0.5)-N(1.0) | | | |
| | N >= C: N-terminal side will be inside | | | |
| | MITDISC: discrimination of mitochondrial targeting seq | | | |
| | R content: | 0 | Hyd Moment(75): | 1.71 |
| | Hyd Moment(95): | 1.49 | G content: | 0 |
| | D/E content: | 1 | S/T content: | 4 |

Score: −4.94
Gavel: prediction of cleavage sites for mitochondrial preseq
cleavage site motif not found
NUCDISC: discrimination of nuclear localization signals
pat4: PRRR (4) at 85
pat4: RRRR (5) at 86
pat4: RRRR (5) at 87
pat7: PPRRRRR (5) at 84
pat7: PRRRRRS (5) at 85
bipartite: none
content of basic residues: 16.6%
NLS Score: 1.27
KDEL: ER retention motif in the C-terminus: none
ER Membrane Retention Signals:
KKXX-like motif in the C-terminus: RWRK
SKL: peroxisomal targeting signal in the C-terminus: none
PTS2: 2nd peroxisomal targeting signal: none
VAC: possible vacuolar targeting motif: none
RNA-binding motif: none
Actinin-type actin-binding motif:
type 1: none
type 2: none
NMYR: N-myristoylation pattern: none
Prenylation motif: none
memYQRL: transport motif from cell surface to Golgi: none
Tyrosines in the tail: none
Dileucine motif in the tail: none
checking 63 PROSITE DNA binding motifs: none
checking 71 PROSITE ribosomal protein motifs: none
checking 33 PROSITE prokaryotic DNA binding motifs: none
NNCN: Reinhardt's method for Cytoplasmic/Nuclear discrimination
Prediction: nuclear
Reliability: 94.1
COIL: Lupas's algorithm to detect coiled-coil regions
total: 0 residues
Final Results (k = 9/23):
55.6%: extracellular, including cell wall
33.3%: nuclear
11.1%: cytoplasmic
>> prediction for CG57431-03 is exc (k = 9)

[0443] A search of the NOV15a protein against the Geneseq database, a proprietary database that contains sequences published in patents and patent publication, yielded several homologous proteins shown in Table 15D.

TABLE 15D
Geneseq Results for NOV15a

| | | NOV15a | Identities/ | |
|---|---|---|---|---|
| | | Residues/ | Similarities for | |
| Geneseq | Protein/Organism/Length [Patent #, | Match | the Matched | Expect |
| Identifier | Date] | Residues | Region | Value |
| AAE15748 | Human endothelin 2 (EDN2) - Homo | 1 . . . 145 | 144/178 (80%) | 3e−79 |
| | sapiens, 178 aa. [WO200190118-A2, | 1 . . . 178 | 144/178 (80%) | |
| | 29 NOV. 2001] | | | |
| AAR23784 | Precursor ET-2 sequence - Homo | 1 . . . 145 | 144/178 (80%) | 3e−79 |
| | sapiens, 178 aa. [EP484017-A, | 1 . . . 178 | 144/178 (80%) | |
| | 06 MAY 1992] | | | |
| AAR20231 | Human endothelin-2 vasoconstrictor | 1 . . . 145 | 144/178 (80%) | 3e−79 |
| | peptide - Homo sapiens, 178 aa. | 1 . . . 178 | 144/178 (80%) | |
| | [EP468337-A, 29 JAN. 1992] | | | |
| AAR60320 | Pre-pro-vasoactive intestinal | 6 . . . 120 | 89/115 (77%) | 3e−51 |
| | contractor protein - Mus musculus, | 3 . . . 117 | 99/115 (85%) | |
| | 160 aa. [JP06169774-A, | | | |
| | 21 JUN. 1994] | | | |
| AAR60319 | Pre-pro-vasoactive intestinal | 6 . . . 120 | 89/115 (77%) | 3e−51 |
| | contractor protein - Mus musculus, | 3 . . . 117 | 99/115 (85%) | |
| | 160 aa. [JP06169774-A, | | | |
| | 21 JUN. 1994] | | | |

[0444] In a BLAST search of public sequence databases, the NOV15a protein was found to have homology to the proteins shown in the BLASTP data in Table 15E.

TABLE 15E
Public BLASTP Results for NOV15a

| | | NOV15a | Identities/ | |
|---|---|---|---|---|
| Protein | | Residues/ | Similarities for | |
| Accession | | Match | the Matched | Expect |
| Number | Protein/Organism/Length | Residues | Portion | Value |
| P20800 | Endothelin-2 precursor (ET-2) - | 1 . . . 145 | 144/178 (80%) | 8e−79 |
| | Homo sapiens (Human), 178 aa. | 1 . . . 178 | 144/178 (80%) | |
| BAC54893 | Preproendothelin-2 - Equus caballus | 1 . . . 145 | 116/178 (65%) | 2e−60 |
| | (Horse), 178 aa. | 1 . . . 178 | 123/178 (68%) | |
| Q8MJW9 | Preproendothelin-2 - Mustela putorius | 1 . . . 144 | 108/177 (61%) | 2e−56 |
| | furo (Ferret), 178 aa. | 1 . . . 177 | 120/177 (67%) | |
| P23943 | Endothelin-2 precursor (ET-2) | 4 . . . 145 | 103/175 (58%) | 4e−53 |
| | (Vasoactive intestinal contractor) | 2 . . . 176 | 114/175 (64%) | |
| | (VIC) - Rattus norvegicus (Rat), 176 | | | |
| | aa. | | | |
| S17194 | endothelin 2 precursor - mouse, 160 | 6 . . . 120 | 89/115 (77%) | 8e−51 |
| | aa. | 3 . . . 117 | 99/115 (85%) | |

[0445] PFam analysis predicts that the NOV15a protein contains the domains shown in the Table 15F.

TABLE 15F
Domain Analysis of NOV15a

| | | Identities/ | |
|---|---|---|---|
| | NOV15a | Similarities | Expect |
| Pfam Domain | Match Region | for the Matched Region | Value |
| endothelin | 44 . . . 74 | 28/31 (90%) | 5.4e−19 |
| | | 29/31 (94%) | |

### Example 16

[0446] The NOV16 clone was analyzed, and the nucleotide and encoded polypeptide sequences are shown in Table 16A.

TABLE 16A
NOV16 Sequence Analysis

| | | |
|---|---|---|
| NOV16a, CG59253-01 | SEQ ID NO: 195 | 1894 bp |
| DNA Sequence | ORF Start: ATG at 46 | ORF Stop: TAG at 1474 |

TGGCATTTCTGAGCAGGGGCCACCCTGACTTCACCTTGGCCCACCATGAGGGTCTTCCTGCTTTGTGCCTACA
TACTGCTGCTGATGGTTTCCCAGTTGAGGGCAGTCAGCTTTCCTGAAGATGATGAACCCCTTAATACTGTCGA
CTATCACTATTCAAGGCAATATCCGGTTTTTAGAGGACGCCCTTCAGGCAATGAATCGCAGCACAGGCTGGAC
TTTCAGCTGATGTTGAAAATTCGAGACACACTTTATATTGCTGGCAGGGATCAAGTTTATACAGTAAACTTAA
ATGAAATGCCCAAAACAGAAGTAATACCCAACAAGAAACTGACATGGCGATCAAGACAACAGGATCGAGAAAA
CTGTGCTATGAAAGGCAAGCATAAAGATGAATGCCACAACTTTATCAAAGTATTTGTTCCAAGAAACGATGAG
ATGGTTTTTGTTTGTGGTACCAATGCATTCAATCCCATGTGTAGATACTACAGGTTGAGTACCTTAGAATATG
ATGGGGAAGAAATTAGTGGCCTGGCAAGATGCCCATTTGATGCCAGACAAACCAATGTTGCCCTCTTTGCTGA
TGGGAAGCTGTATTCTGCCACAGTGGCTGACTTCTTGGCCAGCGATGCCGTTATTTATCGAAGCATGGGTGAT
GGATCTGCCCTTCGCACAATAAAATATGATTCCAAATGGATAAAAGAGCCACACTTTCTTCATGCCATAGAAT
ATGGAAACTATGTCTATTTCTTCTTTCGAGAAATCGCTGTCGAACATAATAATTTAGGCAAGGCTGTGTATTC
CCGCGTGGCCCGCATATGTAAAAACGACATGGGTGGTTCCCAGCGGGTCCTGGAGAAACACTGGACTTCATTT
CTAAACGCTCGGCTGAACTGTTCTGTCCCTGGAGATTCGTTTTTCTACTTTGATGTTCTGCAGTCTATTACAG
ACATAATACAAATCAATGGCATCCCCACTGTGGTCGGGGTGTTTACCACGCAGCTCAATAGCATCCCTGGTTC
TGCTGTCTGTGCATTTAGCATGGATGACATTGAAAAAGTATTCAAAGGACGGTTTAAGGAACAGAAAACTCCA
GATTCTGTTTGGACAGCAGTTCCCGAAGACAAAGTGCCAAAGCCAAGGCCTGGCTGTTGTGCAAAACACGGCC
TTGCCGAAGCTTATAAAACCTCCATCGATTTCCCGGATGAAACTCTGTCATTCATCAAATCTCATCCCCTGAT
GGACTCTGCCGTTCCACCCATTGCCGATGAGCCCTGGTTCACAAAGACTCGGGTCAGGTACAGACTGACGGCC
ATCTCAGTGGACCATTCAGCCGGACCCTACCAGAACTACACAGTCATCTTTGTTGGCTCTGAAGCTGGCATGG
TACTTAAAGTTCTGGCAAAGACCAGTCCTTTCTCTTTGAACGACAGCGTATTACTGGAAGAGATTGAAGCCTA
CAACCATGCAAAGTAGGTATATGTTACGAGAACGCCCTTCAGCACTGCTCAAAAATTTTCGGCATGTATTTCA
TCTAGTCATGTCCTTTTGGTCCTCTAAATTAGCAGTGGTTTGGCATAATAGTGTTTTGTGTTTTTTTTCTCAT
TGAAATAAATCTTGGGTTTGTTTTTTTCCCGAGCCTGCTAGGGCGAGGGGGGTGAATGGTTGATCAGTTTAAA
AATAATGCAGCCCTTGTTTTTCACCTCTAGAATATGAGAACATTTTAACAGCACCTCTCTTATCTTGCAGATA
TATTCCAAGATGCTACATGCAGCAGACAGCTGTGAGCTTGCATACACACACACACAAATATACATGCACATAC
ATACACAGAATGTAGTACTAGTTAAGTATTTCCTTCCTATCTTTAATAAGTAAGAGAATATTTAGACCA

| | | | |
|---|---|---|---|
| NOV16a, CG59253-01 | | | |
| Protein Sequence | SEQ ID NO: 196 | 476 aa | MW at 54216.4kD |

MRVFLLCAYILLLMVSQLRAVSFPEDDEPLNTVDYHYSRQYPVFRGRPSGNESQHRLDFQLMLKIRDTLYIAG
RDQVYTVNLNEMPKTEVIPNKKLTWRSRQQDRENCAMKGKHKDECHNFIKVFVPRNDEMVFVCGTNAFNPMCR
YYRLSTLEYDGEEISGLARCPFDARQTNVALFADGKLYSATVADFLASDAVIYRSMGDGSALRTIKYDSKWIK
EPHFLHAIEYGNYVYFFFREIAVEHNNLGKAVYSRVARICKNDMGGSQRVLEKHWTSFLKARLNCSVPGDSFF
YFDVLQSITDIIQINGIPTVVGVFTTQLNSIPGSAVCAFSMDDIEKVFKGRFKEQKTPDSVWTAVPEDKVPKP
RPGCCAKHGLAEAYKTSIDFPDETLSFIKSHPLMDSAVPPIADEPWFTKTRVRYRLTAISVDHSAGPYQNYTV
IFVGSEAGMVLKVLAKTSPFSLNDSVLLEEIEAYNHAK

| | | |
|---|---|---|
| NOV16b, 194877881 | SEQ ID NO: 197 | 1383 bp |
| DNA Sequence | ORF Start: at 1 | ORF Stop: end of sequence |

GGATCCGTCAGCTTTCCTGAAGATGATGAACCCCTTAATACTGTCGACTATCACTATTCAAGGCAATATCCGG
TTTTTAGAGGACGCCCTTCAGGCAATGAATCGCAGCACAGGCTGGACTTTCAGCTGATGTTGAAAATTCGAGA
CACACTTTATATTGCTCGCAGGGATCAAGTTTATACAGTAAACTTAAATGAAATGCCCAAAACAGAAGTAATA
CCCAACAAGAAACTGACATGGCGATCAAGACAACAGGATCGAGAAAACTGTGCTATGAAAGGCAAGCATAAAG
ATGAATGCCACAACTTTATCAAAGTATTTGTTCCAAGAAACGATGAGATGGTTTTTGTTTGTGGTACCAATGC
ATTCAATCCCATGTGTAGATACTACAGGTTGAGTACCTTAGAATATGATGGGGAAGAAATTAGTGGCCTGGCA
AGATGCCCATTTGATGCCAGACAAACCAATGTTGCCCTCTTTGCTGATGGGAAGCTGTATTCTGCCACAGTGG
CTGACTTCTTGGCCAGCGATGCCGTTATTTATCGAAGCATGGGTGATGGATCTGCCCTTCGCACAATAAAATA
TGATTCCAAATGGATAAAAGAGCCACACTTTCTTCATGCCATAGAATATGGAAACTATGTCTATTTCTTCTTT
CGAGAAATCGCTGTCGAACATAATAATTTAGGCAAGGCTGTGTATTCCCGCGTGGCCCGCATATGTAAAAACG
ACATGGGTGGTTCCCAGCGGGTCCTGGAGAAACACTGGACTTCATTTCTAAAGGCTCGGCTGAACTGTTCTGT
CCCTGGAGATTCGTTTTTCTACTTTGATGTTCTGCAGTCTATTACAGACATAATACAAATCAATGGCATCCCC
ACTGTGGTCGGGGTGTTTACCACCCAGCTCAATAGCATCCCTGGTTCTGCTGTCTGTGCATTTAGCATGGATG
ACATTGAAAAAGTATTCAAAGGACGGTTTAAGGAACAGAAAACTCCAGATTCTGTTTGGACAGCAGTTCCCGA
AGACAAAGTGCCAAAGCCAAGGCCTGGCTGTTGTGCAAAACACGGCCTTGCCGAAGCTTATAAAACCTCCATC
GATTTCCCGGATGAAACTCTGTCATTCATCAAATCTCATCCCCTGATGGACTCTGCCGTTCCACCCATTGCCG
ATGAGCCCTGGTTCACAAAGACTCGGGTCAGGTACAGACTGACGGCCATCTCAGTGGACCATTCAGCCGGACC
CTACCAGAACTACACAGTCATCTTTGTTGGCTCTGAAGCTGGCATGGTACTTAAAGTTCTGGCAAAGACCAGT
CCTTTCTCTTTGAACGACAGCGTATTACTGGAAGAGATTGAAGCCTACAACCATGCAAAGTGCCTCGAG

| | | | |
|---|---|---|---|
| NOV16b, 194877881 | | | |
| Protein Sequence | SEQ ID NO: 198 | 461 aa | MW at 52370.0kD |

GSVSFPEDDEPLNTVDYHYSRQYPVFRGRPSGNESQHRLDFQLMLKIRDTLYIAGRDQVYTVNLNEMPKTEVI
PNKKLTWRSRQQDRENCAMKGKHKDECHNFIKVFVPRNDEMVFVCGTNAFNPMCRYYRLSTLEYDGEEISGLA
RCPFDARQTNVALFADGKLYSATVADFLASDAVIYRSMGDGSALRTIKYDSKWIKEPHFLHAIEYGNYVYFFF
REIAVEHNNLGKAVYSRVARICKNDMGGSQRVLEKHWTSFLKARLNCSVPGDSFFYFDVLQSITDIIQINGIP
TVVGVFTTQLNSIPGSAVCAFSMDDIEKVFKGRFKEQKTPDSVWTAVPEDKVPKPRPGCCAKHGLAEAYKTSI
DFPDETLSFIKSHPLMDSAVPPIADEPWFTKTRVRYRLTAISVDHSAGPYQNYTVIFVGSEAGMVLKVLAKTS
PFSLNDSVLLEEIEAYNHAKCLE

| | | |
|---|---|---|
| NOV16c, CG59253-02 | SEQ ID NO: 199 | 3205 bp |
| DNA Sequence | ORF Start: ATG at 46 | ORF Stop: TAG at 3151 |

TGGCATTTCTGAGCAGGGGCCACCCTGACTTCACCTTGGCCCACCATGAGGGTCTTCCTGCTTTGTGCCTACA
TACTGCTGCTGATGGTTTCCCAGTTGAGGGCAGTCAGCTTTCCTGAAGATGATGAACCCCTTAATACTGTCGA
CTATCACTGTAAGTCGTCTAGGCAATATCCGGTTTTTAGAGGACGCCCTTCAGGCAATGAATCGCAGCACAGG
CTGGACTTTCAGCTGATGTTGAAAATTCGAGACACACTTTATATTGCTGGCAGGGATCAAGTTTATACAGTAA
ACTTAAATGAAATGCCCAAAACAGAAGTAATATGGCAACAGAAACTGACATGGCGATCAAGACAACAGGATCG
AGAAAACTGTGCTATGAAAGGCAAGCATAAAGATGAATGCCACAACTTTATCAAAGTATTTGTTCCAAGAAAC
GATGAGATGGTTTTTGTTTGTGGTACCAATGCATTCAATCCCATGTGTAGATACTACAGGGTAAGTACCTTAG
AATATGATGGGGAAGAAATTAGTGGCCTGGCAAGATGCCCATTTGATGCCAGACAAACCAATGTTGCCCTCTT
TGCTGATGGGAAGCTGTATTCTGCCACAGTGGCTGACTTCTTGGCCAGCGATGCCGTTATTTATCGAAGCATG
GGTGATGGATCTGCCCTTCGCACAATAAAATATGATTCCAAATGGATAAAAGAGCCACACTTTCTTCATGCCA
TAGAATATGGAAACTATGTCTATTTCTTCTTTCGAGAAATCGCTGTCGAACATAATAATTTAGGCAAGGCTGT
GTATTCCCGCGTGGCCCGCATATGTAAAAACGACATGGGTGGTTCCCAGCGGGTCCTGGAGAAACACTGGACT
TCATTTCTAAAGGCTCGGCTGAACTGTTCTGTCCCTGGAGATTCGTTTTTCTACTTTGATGTTCTGCAGTCTA
TTACAGACATAATACAAATCAATGGCATCCCCACTGTGGTCGGGGTGTTTACCACGCAGCTCAATAGCATCCC
TGGTTCTGCTGTCTGTGCATTTAGCATGGATGACATTGAAAAAGTATTCAAAGGACGGTTTAAGGAACAGAAA
ACTCCAGATTCTGTTTGGACAGCAGTTCCCGAAGACAAAGTGCCAAAGCCAAGGCCTGGCTGTTGTGCAAAAC
ACGGCCTTGCCGAAGCTTATAAAACCTCCATCGATTTCCCGGATGAAACTCTGTCATTCATCAAATCTCATCC
CCTGATGGACTCTGCCGTTCCACCCATTGCCGATGAGCCCTGGTTCACAAAGACTCGGGTCAGGTACAGACTG
ACGGCCATCTCAGTGGACCATTCAGCCGGACCCTACCAGAACTACACAGTCATCTTTGTTGGCTCTGAAGCTG
GCATGGTACTTAAAGTTCTGGCAAAGACCAGTCCTTTCTCTTTGAACGACAGCGTATTACTGGAAGAGATTGA
AGCCTACAACCATGCAAAGTGCAGTGCTGAGAATGAGGAAGACAAAAAGGTCATCTCATTACAGTTGGATAAA
GATCACCACGCTTTATATGTGGCGTTCTCTAGCTGCATTATCCGCATCCCCCTCAGTCGCTGTGAGCGTTATG
GATCATGTAAAAAGTCTTGTATTGCATCTCGTCACCCGTATTGTCGCTGGTTAAGCCAGGCATCCTGTGCTAG
AGTGACCCCAAACCACAGTGCTGAAGGATATGAACAAGACACAGAATTCGGCAACACAGCTCATCTAGGGGAC
TGCCATGCATATGAACCATATGAAGGTCGTGTTGGCTCACTGAAAGCCATTTGCTATTTATTATTATTTTTAA
AAAGCACCTTATTCACATTGTCCCATGTGTCTATTTCAGGTGTACGATGGGAAGTCCAGTCTGGAGAGTCCAA
CCAGATGGTCCACATGAATCTCCTCATCACCTGTGTCTTTGCTGCTTTTGTTTTCGCGGCATTCATTGCAGGT
GTGGCAGTATACTGCTATCGAGACATGTTTGTTCGGAAAAACAGAAAGATCCATAAAGATGCAGAGTCCGCCC
AGTCATGCACAGACTCCAGTGGAAGTTTTGCCAAACTGAATGGTCTCTTTGACAGCCCTGTCAAGGAATACCA
ACAGAATATTGATTCTCCTAAACTGTATAGTAACCTGCTAACCAGTCGGAAAGAGCTACCACCCAATGGAGAT
ACTAAATCCATGGTAATGGACCATCGAGGGCAACCTCCAGAGTTGGCTGCTCTTCCTACTCCTGAGTCTACAC
CCGTGCTTCACCAGAAGACCCTGCAGGCCATGAAGAGCCACTCAGAAAAGGCCCATGGCCATGGAGCTTCAAG
GAAAGAAACCCCTCAGTTTTTTCCGTCTAGTCCGCCACCTCATTCCCCATTAAGTCATGGGCATATCCCCAGT
GCCATTGTTCTTCCAAATGCTACCCATGACTACAACACGTCTTTCTCAAACTCCAATGCTCACAAAGCTGAAA
AGAAGCTTCAAAACATTGATCACCCTCTCACAAAGTCATCCAGTAAGAGAGATCACCCGCGTTCTGTTGATTC
CAGAAATACCCTCAATGATCTCCTGAAGCATCTGAATGACCCAAATAGTAACCCCAAAGCCATCATGGGAGAC
ATCCAGATGGCACACCAGAACTTAATGCTGGATCCCATGGGATCGATGTCTGAGGTCCCACCTAAAGTCCCTA
ACCGGGAGGCATCGCTATACTCCCCTCCTTCAACTCTCCCCAGAAATAGCCCAACCAAGCGAGTGGATGTCCC
CACCACTCCTGGAGTCCCAATGACTTCTCTGGAAAGACAAAGAGGTTATCACAAAAATTCCTCCCAGAGGCAC
TCTATATCTGCTATGCCTAAAAACTTAAACTCACCAAATGGTGTTTTGTTATCCAGACAGCCTAGTATGAACC
GTGGAGGATATATGCCCACCCCCACTGGGGCGAAGGTGGACTATATTCAGGGAACACCAGTGAGTGTTCATCT
GCAGCCTTCCCTCTCCAGACAGAGCAGCTACACCAGTAATGGCACTCTTCCTAGGACGGGACTAAAGAGGACG
CCGTCCTTAAAACCTGACGTGCCACCAAAGCCTTCCTTTGTTCCTCAAACCCCATCTGTCAGACCACTGAACA
AATACACATACTAGGCCTCAAGTGTGCTATTCCCATGTGGCTTTATCCTGTCCGTGTTGTTGAGAG

| | | | |
|---|---|---|---|
| NOV16c, CG59253-02 | | | |
| Protein Sequence | SEQ ID NO: 200 | 1035 aa | MW at 115912.6kD |

MRVFLLCAYILLLMVSQLRAVSFPEDDEPLNTVDYHCKSSRQYPVFRGRPSGNESQHRLDFQLMLKIRDTLYI
AGRDQVYTVNLNEMPKTEVIWQQKLTWRSRQQDRENCANKGKHKDECHNFIKVFVPRNDEMVFVCGTNAFNPM
CRYYRVSTLEYDGEEISGLARCPFDARQTNVALFADGKLYSATVADFLASDAVIYRSMGDGSALRTIKYDSKW
IKEPHFLHAIEYGNYVYFFFREIAVEHNNLGKAVYSRVARICKNDMGGSQRVLEKHWTSFLKARLNCSVPGDS
FFYFDVLQSITDIIQINGIPTVVGVFTTQLNSIPGSAVCAFSMDDIEKVFKGRFKEQKTPDSVWTAVPEDKVP
KPRPGCCAKHGLAEAYKTSIDFPDETLSFIKSHPLMDSAVPPIADEPWFTKTRVRYRLTAISVDHSAGPYQNY
TVIFVGSEAGMVLKVLAKTSPFSLNDSVLLEEIEAYNHAKCSAENEEDKKVISLQLDKDHHALYVAFSSCIIR
IPLSRCERYGSCKKSCIASRDPYCGWLSQGSCGRVTPNHSAEGYEQDTEFGNTAHLGDCHAYEPYEGRVGSLK
AICYLLLFLKSTLFTLSHVSISGVRWEVQSGESNQMVHMNVLITCVFAAFVLGAFIAGVAVYCYRDMFVRKNR
KIHKDAESAQSCTDSSGSFAKLNGLFDSPVKEYQQNIDSPKLYSNLLTSRKELPPNGDTKSMVMDHRGQPPEL
AALPTPESTPVLHQKTLQAMKSHSEKAHGHGASRKETPQFFPSSPPPHSPLSHGHIPSAIVLPNATHDYNTSF
SNSNAHKAEKKLQNIDHPLTKSSSKRDHRRSVDSRNTLNDLLKHLNDPNSNPKAIMGDIQMAHQNLMLDPMGS
MSEVPPKVPNREASLYSPPSTLPRNSPTKRVDVPTTPGVPMTSLERQRGYHKNSSQRHSISAMPKNLNSPNGV
LLSRQPSMNRGGYMPTPTGAKVDYIQGTPVSVHLQPSLSRQSSYTSNGTLPRTGLKRTPSLKPDVPPKPSFVP
QTPSVRPLNKYTY

| | | |
|---|---|---|
| NOV16d, 191815765 | SEQ ID NO: 201 | 1713 bp |
| DNA Sequence | ORF Start: at 1 | ORF Stop: end of sequence |

GGATCCGTCAGCTTTCCTGAAGATGATGAACCCCTTAATACTGTCGACTATCACTATTCAAGGCAATATCCGG
TTTTTAGAGGACGCCCTTCAGGCAATGAATCGCAGCACAGGCTGGACTTTCAGCTGATGTTGAAAATTCGAGA
CACACTTTATATTGCTGGCGGGGATCAAGTTTATACAGTAAACTTAAATGAAATGCCCAAAACAGAAGTAATA
CCCAACAAGAAACTGACATGGCGATCAAGACAACAGGATCGAGAAAACTGTGCTATGAAAGGCAAGCATAAAG
ATGAATGCCACAACTTTATCAAAGTATTTGTTCCAAGAAACGATGAGATGGTTTTTGTTTGTGGTACCAATGC
ATTCAATCCCATGTGTAGATACTACAGGTTGAGTACCTTACAATATGATGGGGAAGAAATTAGTGGCCTGGCA
AGATGCCCATTTGATGCCAGACAAACCAATGTTGCCCTCTTTGCTGATGGGAAGCTGTATTCTGCCACAGTGG
CTGACTTCTTGGCCAGCGATGCCGTTATTTATCGAAGCATGGGTGATGGATCTGCCCTTCGCACAATAAAATA
TGATTCCAAATGGATAAAAGAGCCACACTTTCTTCATGCCATAGAATATGGAAACTATGTCTATTTCTTCTTT
CGAGAAATCGCTGTCGAACATAATAATTTAGGCAAGGCTGTGTATTCCCGCGTGGCCCGCATATGTAAAAACG
ACATCGGTGGTTCCCAGCGGGTCCTGGAGAAACACTGGACTTCATTTCTAAAGGCTCGGCTGAACTGTTCTGT
CCCTGGAGATTCGTTTTTCTACTTTGATGTTCTGCAGTCTATTACAGACATAATACAAATCAATGGCATCCCC
ACTGTGGTCGGGGTGTTTACCACGCAGCTCAATAGCATCCCTGGTTCTCCTGTCTGTGCATTTAGCATGGATG
ACATTGAAAAAGTATTCAAAGGACGGTTTAAGGAACAGAAAACTCCAGATTCTGTTTGGACAGCAGTTCCCGA
AGACAAAGTGCCAAAGCCAAGGCCTGGCTGTTGTGCAAAACACGGCCTTGCCGAAGCTTATAAAACCTCCATC
GATTTCCCGGATGAAACTCTGTCGTTCATCAAATCTCATCCCCTGATGGACTCTGCCGTTCCACCCATTGCCG
ATGAGCCCTGGTTCACAAAGACTCGGGTCAGGTACAGACTGACGGCCATCTCAGTGGACCATTCAGCCGGACC
CTACCAGAACTACACAGTCATCTTTGTTGGCTCTGAAGCTGGCATGGTACTTAAAGTTCTGGCAAAGACCAGT
CCTTTCTCTTTGAACGACAGCGTATTACTGGAAGAGATTGAAGCCTACAACCATGCAAGTGCCAATGCTGAGA
ATGAGGAAGACAAAAAGGTCATCTCATTACAGTTGGATAAAGATCACCACGCTTTATATGTGGCGTTCTCTAG
CTGCATTATCCGCATCCCCCTCAGTCGCTGTGAGCGTTATGGATCATGTAAAAAGTCTTGTATTGCATCTCGT
GACCCGTATTGTGGCTGGTTAAGCCAGGGATCCTGTGGTAGAGTGACCCCAGGGATGCTTGCTGAAGGATATG
AACAAGACACAGAATTCGGCAACACAGCTCATCTAGGGGACTGCCATGGTGTACGATGGGAAGTCCAGTCTGG
AGAGTCCAACCAGATGGTCCACATGAATCTCGAG

| | | | |
|---|---|---|---|
| NOV16d, 191815765 | | | |
| Protein Sequence | SEQ ID NO: 202 | 571 aa | MW at 64535.4kD |

GSVSFPEDDEPLNTVDYHYSRQYPVFRGRPSGNESQHRLDFQLMLKIRDTLYIAGGDQVYTVNLNEMPKTEVI
PNKKLTWRSRQQDRENCAMKGKHKDECHNFIKVFVPRNDEMVFVCGTNAFNPMCRYYRLSTLEYDGEEISGLA
RCPFDARQTNVALFADGKLYSATVADFLASDAVIYRSMGDGSALRTIKYDSKWIKEPHFLHAIEYGNYVYFFF
REIAVEHNNLGKAVYSRVARICKNDMGGSQRVLEKHWTSFLKARLNCSVPGDSFFYFDVLQSITDIIQINGIP
TVVGVFTTQLNSIPGSAVCAFSMDDIEKVFKGRFKEQKTPDSVWTAVPEDKVPKPRPGCCAKHGLAEAYKTSI
DFPDETLSFIKSHPLMDSAVPPIADEPWFTKTRVRYRLTAISVDHSAGPYQNYTVTFVGSEAGMVLKVLAKTS
PFSLNDSVLLEEIEAYNHAKCNAENEEDKKVISLQLDKDHHALYVAFSSCIIRIPLSRCERYGSCKKSCIASR
DPYCGWLSQGSCGRVTPGMLAEGYEQDTEFGNTAHLGDCHGVRWEVQSGESNQMVHMNLE

| | | |
|---|---|---|
| NOV16e, CG59253-03 | SEQ ID NO: 203 | 1383 bp |
| DNA Sequence | ORF Start: at 7 | ORF Stop: at 1375 |

GGATCCGTCAGCTTTCCTGAAGATGATGAACCCCTTAATACTGTCGACTATCACTATTCAAGGCAATATCCGG
TTTTTAGAGGACGCCCTTCAGGCAATGAATCGCAGCACAGGCTGGACTTTCAGCTGATGTTGAAAATTCGAGA
CACACTTTATATTGCTGGCAGGGATCAAGTTTATACAGTAAACTTAATGAAATGCCCCAAAACAGAAGTAATA
CCCAACAAGAAACTGACATGGCGATCAAGACAACAGGATCGAGAAAACTGTGCTATGAAAGGCAAGCATAAAG
ATGAATGCCACAACTTTATCAAAGTATTTGTTCCAAGAAACGATGAGATGGTTTTTGTTTGTGGTACCAATGC
ATTCAATCCCATGTGTAGATACTACAGGTTGAGTACCTTAGAATATGATGGGGAAGAAATTAGTGGCCTGGCA
AGATGCCCATTTGATGCCAGACAAACCAATGTTGCCCTCTTTGCTGATGGGAAGCTGTATTCTGCCACAGTGG
CTGACTTCTTGGCCAGCGATGCCGTTATTTATCGAAGCATGGGTGATGGATCTGCCCTTCGCACAATAAAATA
TGATTCCAAATGGATAAAAGAGCCACACTTTCTTCATGCCATAGAATATGGAAACTATGTCTATTTCTTCTTT
CGAGAAATCGCTGTCGAACATAATAATTTAGGCAAGGCTGTGTATTCCCGCGTGGCCCGCATATGTAAAAACG
ACATGGGTGGTTCCCAGCGGGTCCTGGAGAAACACTGGACTTCATTTCTAAAGGCTCGGCTGAACTGTTCTGT
CCCTGGAGATTCGTTTTTCTACTTTGATGTTCTGCAGTCTATTACAGACATAATACAAATCAATGGCATCCCC
ACTGTGGTCGGGGTCTTTACCACGCAGCTCAATAGCATCCCTGGTTCTGCTGTCTGTGCATTTAGCATGGATG
ACATTGAAAAAGTATTCAAAGGACGGTTTAAGGAACAGAAAACTCCAGATTCTGTTTGGACAGCAGTTCCCGA
AGACAAAGTGCCAAAGCCAAGGCCTGGCTGTTGTGCAAAACACGGCCTTGCCGAAGCTTATAAAACCTCCATC
GATTTCCCGGATGAAACTCTGTCATTCATCAAATCTCATCCCCTGATGGACTCTGCCGTTCCACCCATTGCCG
ATGAGCCCTGGTTCACAAAGACTCGGGTCAGGTACAGACTGACGGCCATCTCAGTGGACCATTCAGCCGGACC
CTACCAGAACTACACAGTCATCTTTGTTGGCTCTGAAGCTGGCATGGTACTTAAAGTTCTGGCAAAGACCAGT
CCTTTCTCTTTGAACGACAGCGTATTACTGGAAGAGATTGAAGCCTACAACCATGCAAAGTGCCTCGAG

| | | | |
|---|---|---|---|
| NOV16e, CG59253-03 | | | |
| Protein Sequence | SEQ ID NO: 204 | 456 aa | MW at 51880.5kD |

VSFPEDDEPLNTVDYHYSRQYPVFRGRPSGNESQHRLDFQLMLKIRDTLYIAGRDQVYTVNLNEMPKTEVIPN
KKLTWRSRQQDRENCANKGKHKDECHNFIKVFVPRNDEMVFVCGTNAFNPMCRYYRLSTLEYDGEEISGLARC
PFDARQTNVALFADGKLYSATVADFLASDAVIYRSMGDGSALRTIKYDSKWIKEPHFLHAIEYGNYVYFFFRE
IAVEHNNLGKAVYSRVARICKNDMGGSQRVLEKHWTSFLKARLNCSVPGDSFFYFDVLQSITDIIQINGIPTV
VGVFTTQLNSIPGSAVCAFSMDDIEKVFKGRFKEQKTPDSVWTAVPEDKVPKPRPGCCAKHGLAEAYKTSIDF
PDETLSFIKSHPLMDSAVPPIADEPWFTKTRVRYRLTAISVDHSAGPYQNYTVIFVGSEAGMVLKVLAKTSPF
SLNDSVLLEEIEAYNHAK

| | | |
|---|---|---|
| NOV16f, CG59253-04 | SEQ ID NO: 205 | 1713 bp |
| DNA Sequence | ORF Start: at 7 | ORF Stop: at 1708 |

GGATCCGTCAGCTTTCCTGAAGATCATGAACCCCTTAATACTGTCGACTATCACTATTCAAGGCAATATCCGG
TTTTTAGAGGACGCCCTTCAGGCAATGAATCGCAGCACAGGCTGGACTTTCAGCTGATGTTGAAAATTCGAGA
CACACTTTATATTGCTGGCGGGGATCAAGTTTATACAGTAAACTTAAATGAAATGCCCAAAACAGAAGTAATA
CCCAACAAGAAACTGACATGGCGATCAAGACAACAGGATCGAGAAAACTGTGCTATGAAAGGCAAGCATAAAG
ATGAATGCCACAACTTTATCAAAGTATTTGTTCCAAGAAACGATGAGATGGTTTTTGTTTGTGGTACCAATGC
ATTCAATCCCATGTGTAGATACTACAGGTTGAGTACCTTAGAATATGATGGGGAAGAAATTAGTGGCCTGGCA
AGATGCCCATTTGATGCCAGACAAACCAATGTTGCCCTCTTTGCTGATGGGAAGCTCTATTCTGCCACAGTGG
CTGACTTCTTGGCCAGCGATGCCGTTATTTATCGAAGCATGGGTGATGGATCTGCCCTTCGCACAATAAAATA
TGATTCCAAATGGATAAAAGAGCCACACTTTCTTCATGCCATAGAATATGGAAACTATGTCTATTTCTTCTTT
CGAGAAATCGCTGTCGAACATAATAATTTAGGCAAGGCTGTGTATTCCCGCGTGGCCCGCATATGTAAAAACG
ACATGGGTCGTTCCCAGCGGGTCCTGGAGAAACACTGGACTTCATTTCTAAAGGCTCGGCTGAACTGTTCTGT
CCCTGGAGATTCGTTTTTCTACTTTGATGTTCTGCAGTCTATTACAGACATAATACAAATCAATGGCATCCCC
ACTGTGGTCGGGGTGTTTACCACGCAGCTCAATAGCATCCCTGGTTCTGCTGTCTGTGCATTTAGCATGGATG
ACATTGAAAAAGTATTCAAAGGACGGTTTAAGGAACAGAAAACTCCAGATTCTGTTTGGACAGCAGTTCCCGA
AGACAAAGTGCCAAAGCCAAGGCCTGGCTGTTGTGCAAAACACGGCCTTGCCGAAGCTTATAAAACCTCCATC
GATTTCCCGCATGAAACTCTGTCGTTCATCAAATCTCATCCCCTGATGGACTCTGCCGTTCCACCCATTGCCG
ATGACCCCTGGTTCACAAAGACTCGGGTCAGGTACAGACTGACGGCCATCTCAGTGGACCATTCAGCCGGACC
CTACCAGAACTACACAGTCATCTTTGTTGGCTCTGAAGCTGGCATGGTACTTAAAGTTCTGGCAAAGACCAGT
CCTTTCTCTTTGAACGACAGCGTATTACTGGAAGAGATTGAAGCCTACAACCATGCAAAGTGCAATGCTGAGA
ATGAGGAAGACAAAAAGGTCATCTCATTACAGTTGGATAAAGATCACCACGCTTTATATGTGGCGTTCTCTAG
CTGCATTATCCGCATCCCCCTCAGTCGCTGTCAGCGTTATGGATCATGTAAAAAGTCTTGTATTGCATCTCGT
GACCCGTATTGTGCCTGGTTAAGCCAGGGATCCTGTGGTAGAGTGACCCCAGGGATCCTTGCTGAAGGATATG
AACAAGACACAGAATTCGGCAACACAGCTCATCTAGGGCACTGCCATGGTGTACGATGGGAAGTCCAGTCTGG
AGAGTCCAACCAGATGGTCCACATGAATCTCGAG

| | | | |
|---|---|---|---|
| NOV16f, CG59253-04 | | | |
| Protein Sequence | SEQ ID NO: 206 | 567 aa | MW at 64149.1kD |

VSFPEDDEPLNTVDYHYSRQYPVFRGRPSGNESQHRLDFQLMLKIRDTLYIAGGDQVYTVNLNEMPKTEVIPN
KKLTWRSRQQDRENCAMKGKHKDECHNFTKVFVPRNDEMVFVCGTMAFNPMCRYYRLSTLEYDCEEISGLARC
PFDARQTNVALFADGKLYSATVADFLASDAVIYRSMGDGSALRTIKYDSKWIKEPHFLHAIEYGNYVYFFFRE
IAVENNNLGKAVYSRVARICKNDMGGSQRVLEKHWTSFLKARLNCSVPGDSFFYFDVLQSITDIIQINGIPTV
VGVFTTQLNSIPGSAVCAFSMDDIEKVFKGRFKEQKTPDSVWTAVPEDKVPKPRPGCCAKHGLAEAYKTSIDF
PDETLSFIKSHPLMDSAVPPIADEPWFTKTRVRYRLTAISVDHSAGPYQNYTVIFVGSEAGMVLKVLAKTSPF
SLNDSVLLEEIEAYNHAKCNAENEEDKKVISLQLDKDHHALYVAFSSCIIRIPLSRCERYGSCKKSCIASRDP
YCGWLSQGSCGRVTPGMLAEGYEQDTEFGNTAHLGDCHGVRWEVQSGESNQMVHMN

| | | |
|---|---|---|
| NOV16g, CG59253-05 | SEQ ID NO: 207 | 2191 bp |
| DNA Sequence | ORF Start: ATG at 46 | ORF Stop: TGA at 2182 |

TGGCATTTCTGAGCAGGGGCCACCCTGACTTCACCTTGGCCCACCATGAGGGTCTTCCTGCTTTGTGCCTACA
TACTGCTGCTGATGGTTTCCCAGTTGAGGGCAGTCAGCTTTCCTGAAGATGATGAACCCCTTAATACTGTCGA
CTATCACTGTAAGTCGTCTAGGCAATATCCGGTTTTTAGAGGACGCCCTTCAGGCAATGAATCGCAGCACAGG
CTGGACTTTCAGCTGATGTTGAAAATTCGAGACACACTTTATATTGCTGGCAGGGATCAAGTTTATACAGTAA
ACTTAAATGAAATGCCCAAAACAGAAGTAATATGGCAACAGAAACTGACATGGCGATCAAGACAACAGGATCC
AGAAAACTGTGCTATGAAAGGCAAGCATAAAGATGAATGCCACAACTTTATCAAAGTATTTGTTCCAAGAAAC
GATGAGATGGTTTTTGTTTGTGGTACCAATGCATTCAATCCCATGTGTAGATACTACAGGGTAAGTACCTTAG
AATATGATGGGGAAGAAATTAGTGGCCTCGCAAGATGCCCATTTGATGCCAGACAAACCAATGTTCCCCTCTT
TGCTGATGGGAAGCTGTATTCTGCCACAGTGCCTGACTTCTTGGCCAGCGATGCCGTTATTTATCGAAGCATC
GGTGATGGATCTGCCCTTCGCACAATAAAATATGATTCCAAATGGATAAAAGAGCCACACTTTCTTCATGCCA
TAGAATATGGAAACTATGTCTATTTCTTCTTTCGAGAAATCGCTGTCGAACATAATAATTTAGGCAAGGCTGT
GTATTCCCGCGTGGCCCGCATATGTAAAAACGACATCGGTGGTTCCCAGCGGGTCCTGGAGAAACACTGGACT
TCATTTCTAAAGGCTCGGCTGAACTGTTCTGTCCCTGGAGATTCGTTTTTCTACTTTGATGTTCTGCAGTCTA
TTACAGACATAATACAAATCAATGGCATCCCCACTGTCGTCGGGGTGTTTACAACGCAGCTCAATAGCATCCC
TGGTTCTGCTGTCTGTGCATTTAGCATGGATGACATTGAAAAAGTATTCAAAGGACGGTTTAAGGAACAGAAA
ACTCCAGATTCTGTTTGGACAGCAGTTCCCGAAGACAAAGTGCCAAAGCCAAGGCCTGGCTGTTGTGCAAAAC
ACGGCCTTGCCGAAGCTTATAAAACCTCCATCGATTTCCCGGATGAAACTCTGTCATTCATCAAATCTCATCC
CCTGATGGACTCTGCCGTTCCACCCATTGCCGATGAGCCCTGGTTCACAAAGACTCGGGTCAGGTACAGACTG
ACGGCCATCTCAGTGGACCATTCAGCCGGACCCTACCAGAACTACACAGTCATCTTTGTTGGCTCTGAAGCTG
GCATGGTACTTAAAGTTCTGGCAAAGACCAGTCCTTTCTCTTTGAACGACAGCGTATTACTGGAAGAGATTGA
AGCCTACAACCATGCAAAGTGCAGTGCTGAGAATGAGGAAGACAAAAAGGTCATCTCATTACAGTTGGATAAA
GATCACCACGCTTTATATGTGGCGTTCTCTAGCTGCATTATCCGCATCCCCCTCAGTCGCTGTGAGCGTTATG
GATCATGTAAAAAGTCTTGTATTGCATCTCGTGACCCGTATTGTGGCTGGTTAAGCCAGGGATCCTGTGGTAG
AGTGACCCCAGGGATGCTGCTGTTAACCGAAGACTTCTTTGCTTTCCATAACCACAGTGCTGAAGGATATGAA
CAAGACACAGAATTCGGCAACACAGCTCATCTAGGGGACTGCCATGAAATTTTGCCTACTTCAACTACACCAG
ATTACAAAATATTTGGCGGTCCAACATCTGGTGTACGATGGGAAGTCCAGTCTGGAGAGTCCAACCAGATGGT
CCACATGAATGTCCTCATCACCTGTGTCTTTGCTGCTTTTGTTTTGGGGGCATTCATTGCAGGTGTGCCAGTA
TACTGCTATCGAGACATGTTTGTTCGGAAAAACAGAAAGATCCATAAAGATGCAGAGTCCGCCCAGTCATGCA
CAGACTCCAGTGGAAGTTTTGCCAAACTGAATGGTCTCTTTGACAGCCCTGTCAAGGAATACCAACAGAATAT
TGATTCTCCTAAACTGTATAGTAACCTGCTAACCAGTCGGAAAGAGCACGAATTCAGCGGCCGCTGAATTCTA
G

| | | | |
|---|---|---|---|
| NOV16g, CG59253-05 | | | |
| Protein Sequence | SEQ ID NO: 208 | 712 aa | MW at 80536.8kD |

MRVFLLCAYILLLMVSQLRAVSFPEDDEPLNTVDYHCKSSRQYPVFRGRPSGNESQHRLDFQLMLKIRDTLYI
AGRDQVYTVNLNEMPKTEVIWQQKLTWRSRQQDRENCAMKGKHKDECHNFIKVFVPRNDEMVFVCGTNAFNPM
CRYYRVSTLEYDGEEISGLARCPFDARQTNVALFADGKLYSATVADFLASDAVIYRSMGDGSALRTIKYDSKW
IKEPHFLHAIEYGNYVYFFFREIAVEHNNLGKAYSRVARICKNDMGGSQRVLEKHWTSFLKARRLNCSVPGDS
FFYFDVLQSITDIIQTNGIPTVVGVFTTQLNSIPGSAVCAFSMDDIEKVFKGRFKEQKTPDSVWTAVPEDKVP
KPRPGCCAKHGLAEAYKTSIDFPDETLSFIKSHPLMDSAVPPIADEPWFTKTRVRYRLTAISVDHSAGPYQNY
TVIFVGSEAGMVLKVLAKTSPFSLNDSVLLEEIEAYNNAKCSAENEEDKKVISLQLDKDHHALYVAFSSCIIR
IPLSRCERYGSCKKSCIASRDPYCGWLSQGSCGRVTPGMLLLTEDFFAFHNHSAEGYEQDTEFGNTAHLGDCH
EILPTSTTPDYKIFGGPTSCVRWEVQSGESNQMVHMNVLITCVFAAFVLGAFIAGVAVYCYRDMFVRKNRKIH
KDAESAQSCTDSSGSFAKLNGLFDSPVKEYQQNIDSPKLYSNLLTSRKEHEFSGR

| | | |
|---|---|---|
| NOV16h, CG59253-06 | SEQ ID NO: 209 | 3196 bp |
| DNA Sequence | ORF Start: ATG at 46 | ORF Stop: TAG at 3142 |

TGGCATTTCTGAGCAGGGGCCACCCTGACTTCACCTTGGCCCACCATGAGGGTCTTCCTGCTTTGTGCCTACA
TACTGCTGCTGATGGTTTCCCAGTTGAGGGCAGTCAGCTTTCCTGAAGATGATGAACCCCTTAATACTGTCGA
CTATCACTGTAAGTCGTCTAGGCAATATCCCCTTTTTAGAGGACGCCCTTCAGGCAATGAATCGCAGCACAGG
CTGGACTTTCAGCTGATGTTGAAAATTCGAGACACACTTTATATTGCTGGCAGGGATCAAGTTTATACAGTAA
ACTTAAATGAAATGCCCAAAACAGAAGTAATATGGCAACAGAAACTGACATGGCGATCAAGACAACAGGATCG
AGAAAACTGTGCTATGAAAGGCAAGCATAAAGATGAATGCCACAACTTTATCAAAGTATTTGTTCCAAGAAAC
GATGACATGGTTTTTGTTTGTGGTACCAATGCATTCAATCCCATGTCTAGATACTACAGCGTAAGTACCTTAG
AATATGATGGGGAAGAAATTAGTGGCCTGGCAAGATGCCCATTTGATGCCAGACAAACCAATGTTGCCCTCTT
TGCTGATGGGAAGCTGTATTCTGCCACAGTGCCTGACTTCTTGGCCAGCGATGCCGTTATTTATCGAAGCATG
GGTGATGGATCTGCCCTTCGCACAATAAAATATGATTCCAAATGCATAAAAGAGCCACACTTTCTTCATGCCA
TAGAATATGGAAACTATGTCTATTTCTTCTTTCGAGAAATCGCTGTCGAACATAATAATTTAGGCAAGGCTGT
GTATTCCCGCGTGGCCCGCATATGTAAAAACGACATGGGTGGTTCCCAGCGGGTCCTGGAGAAACACTGGACT
TCATTTCTAAAGGCTCGGCTGAACTGTTCTCTCCCTGGAGATTCGTTTTTCTACTTTGATGTTCTGCAGTCTA
TTACAGACATAATACAAATCAATGGCATCCCCACTGTGGTCGGGGTGTTTACCACGCAGCTCAATAGCATCCC
TGGTTCTGCTGTCTGTGCATTTAGCATGGATGACATTGAAAAAGTATTCAAAGGACGGTTTAAGGAACAGAAA
ACTCCAGATTCTGTTTGGACAGCAGTTCCCGAAGACAAAGTGCCAAAGCCAAGGCCTGGCTGTTGTGCAAAAC
ACGGCCTTCCCGAAGCTTATAAAACCTCCATCGATTTCCCGGATGAAACTCTGTCATTCATCAAATCTCATCC
CCTGATGGACTCTGCCGTTCCACCCATTGCCGATGAGCCCTGGTTCACAAAGACTCGGGTCAGCTACAGACTG
ACGGCCATCTCAGTGGACCATTCAGCCGGACCCTACCAGAACTACACAGTCATCTTTGTTGGCTCTGAACCTG
GCATGGTACTTAAAGTTCTGGCAAAGACCAGTCCTTTCTCTTTGAACGACAGCGTATTACTGGAAGAGATTGA
AGCCTACAACCATGCAAAGTGCAGTGCTGAGAATGAGGAAGACAAAAAGGTCATCTCATTACAGTTGGATAAA
GATCACCACGCTTTATATGTGGCGTTCTCTAGCTGCATTATCCGCATCCCCCTCAGTCGCTGTGAGCGTTATG
GATCATGTAAAAAGTCTTGTATTGCATCTCGTGACCCGTATTGTGGCTGGTTAAGCCAGGGATCCTGTGGTAG
AGTGACCCCAGGGATGCTGCTGTTAACCGAAGACTTCTTTGCTTTCCATAACCACAGTGCTGAAGGATATGAA
CAAGACACAGAATTCGGCAACACAGCTCATCTAGGGGACTGCCATGAAATTTTGCCTACTTCAACTACACCAG
ATTACAAAATATTTGGCGGTCCAACATCTGGTGTACGATGGGAAGTCCAGTCTGGAGAGTCCAACCAGATGGT
CCACATGAATGTCCTCATCACCTGTGTCTTTGCTGCTTTTGTTTTGGGGGCATTCATTGCAGGTGTGGCAGTA
TACTGCTATCGAGACATGTTTGTTCGGAAAAACACAAAGATCCATAAAGATGCAGAGTCCGCCCAGTCATGCA
CAGACTCCAGTGGAAGTTTTGCCAAACTGAATGGTCTCTTTGACAGCCCTGTCAAGGAATACCAACAGAATAT
TGATTCTCCTAAACTGTATAGTAACCTGCTAACCAGTCGGAAAGAGCTACCACCCAATGGAGATTCTAAATCC
ATGGTAATGGACCATCGAGGGCAACCTCCACAGTTGGCTGCTCTTCCTACTCCTGAGTCTACACCCGTGCTTC
ACCAGAAGACCCTGCAGGCCATGAAGAGCCACTCAGAAAAGGCCCATGGCCATGGAGCTTCAAGGAAAGAAAC
CCCTCAGTTTTTTCCGTCTAGTCCGCCACCTCATTCCCCATTAAGTCATGGGCATATCCCCAGTGCCATTGTT
CTTCCAAATGCTACCCATGACTACAACACGTCTTTCTCAAACTCCAATGCTCACAAAGCTGAAAAGAAGCTTC
AAAACATTGATCACCCTCTCACAAAGTCATCCAGTAAGAGAGATCACCGGCGTTCTGTTGATTCCAGAAATAC
CCTCAATGATCTCCTGAAGCATCTGAATGACCCAAATAGTAACCCCAAAGCCATCATGGGACACATCCAGATG
GCACACCAGAACTTAATGCTGGATCCCATGGGATCGATGTCTGAGGTCCCACCTAAAGTCCCTAACCGGGAGG
CATCGCTATACTCCCCTCCTTCAACTCTCCCCAGAAATAGCCCAACCAAGCGAGTGGATGTCCCCACCACTCC
TGGAGTCCCAATGACTTCTCTGGAAAGACAAAGAGGTTATCACAAAAATTCCTCCCAGAGGCACTCTATATCT
GCTATGCCTAAAAACTTAAACTCACCAAATGGTGTTTTGTTATCCAGACAGCCTAGTATGAACCGTGGAGGAT
ATATGCCCACCCCCACTGGGGCGAAGGTGGACTATATTCAGGGAACACCAGTGAGTGTTCATCTGCAGCCTTC
CCTCTCCAGACAGAGCAGCTACACCAGTAATGGCACTCTTCCTAGGACGGGACTAAAGAGGACGCCGTCCTTA
AAACCTGACGTGCCACCAAAGCCTTCCTTTGTTCCTCAAACCCCATCTGTCAGACCACTGAACAAATACACAT
ACTAGGCCTCAAGTGTGCTATTCCCATGTGGCTTTATCCTGTCCGTGTTGTTGAGAG

| | | | |
|---|---|---|---|
| NOV16h, CG59253-06 | | | |
| Protein Sequence | SEQ ID NO: 210 | 1032 aa | MW at 115525.0kD |

MRVFLLCAYILLLMVSQLRAVSFPEDDEPLNTVDYHCKSSRQYPVFRGRPSGNESQHRLDFQLMLKIRDTLYI
AGRDQVYTVNLNEMPKTEVIWQQKLTWRSRQQDRENCAMKGKHKDECHNFIKVFVPRNDEMVFVCGTNAFNMP
CRYYRVSTLEYDGEEISCLARCPFDARQTNVALFADGKLYSATVADFLASDAVIYRSMGDGSALRTIKYDSKW
IKEPEFLHAIEYGNYVYFFFREIAVEHNNLGKAVYSRVARICKNDMGGSQRVLEKHWTSFLKARLNCSVPGDS
FFYFDVLQSITDIIQINGIPTVVGVFTTQLNSIPGSAVCAFSMDDIEKVFKGRFKEQKTPDSVWTAVPEDKVP
KPRPGCCAKHGLAEAYKTSIDFPDETLSFIKSHPLMDSAVPPIADEPWFTKTRVRYRLTAISVDHSAGPYQNY
TVIFVGSEAGMVLKVLAKTSPFSLNDSVLLEEIEAYNHAKCSAENEEDKKVISLQLDKDHHALYVAFSSCIIR
IPLSRCERYGSCKKSCIASRDPYCGWLSQGSCGRVTPGMLLLTEDFFAFHNHSAEGYEQDTEFGNTAHLGDCH
EILPTSTTPDYKIFGGPTSGVRWEVQSGSNQMVHMNVLITCVFAAFVLGAFIAGVAVYCRYRDMFVRKNRKIH
KDAESAQSCTDSSGSFAKLNGLFDSPVKEYQQNIDSPKLYSNLLTSRKELPPNGDSKSMMVDHRGQPPELAAL
PTPESTPVLHQKTLQAMKSHSEKAHGHGASRKETPQFFPSSPPPHSPLSHGHIPSAIVLPNATHDYNTSFSNS
NAHKAEKKLQNIDHPLTKSSSKRDHRRSVDSRNTLNDLLKHLNDPNSNPKAIMGDIQMAHQNLMLDPMGSMSE
VPPKVPNREASLYSPPSTLPRNSPTKRVDVPTTPGVPMTSLERQRGYHKNSSQRHSISAMPKNLNSPNGVLLS
RQPSMNRGGYMPTPTGAKVDYIQGTPVSVHLQPSLSRQSSYTSNGTLPRTGLKRTPSLKPDVPPKPSFVPQTP
SVRPLNKYTY

| | | |
|---|---|---|
| NOV16i, CG59253-07 | SEQ ID NO: 211 | 2359 bp |
| DNA Sequence | ORF Start: ATG at 46 | ORF Stop: TGA at 2350 |

TGGCATTTCTGAGCAGGGGCCACCCTGACTTCACCTTGGCCCACCATGAGGGTCTTCCTGCTTTGTGCCTACA
TACTGCTGCTCATGGTTTCCCAGTTGAGGGCAGTCAGCTTTCCTGAAGATGATGAACCCCTTAATACTGTCGA
CTATCACTGTAAGTCGTCTAGGCAATATCCGGTTTTTAGAGGACGCCCTTCAGGCAATGAATCGCAGCACAGG
CTGGACTTTCAGCTGATGTTGAAAATTCGAGACACACTTTATATTGCTGGCAGGGATCAAGTTTATACAGTAA
ACTTAAATGAAATGCCCAAAACAGAAGTAATATGCCAACAGAAACTGACATGGCGATCAAGACAACAGGATCG
AGAAAACTGTGCTATGAAAGGCAAGCATAAAGATGAATGCCACAACTTTATCAAAGTATTTGTTCCAACAAAC
GATGAGATGGTTTTTGTTTGTGGTACCAATGCATTCAATCCCATGTGTAGATACTACAGGGTAAGTACCTTAG
AATATGATGGGGAAGAAATTAGTGGCCTGGCAAGATGCCCATTTGATGCCAGACAAACCAATGTTGCCCTCTT
TGCTGATGGGAAGCTGTATTCTGCCACAGTGGCTGACTTCTTGGCCAGCGATGCCGTTATTTATCGAAGCATG
GGTGATGGATCTGCCCTTCGCACAATAAAATATGATTCCAAATGGATAAAAGAGCCACACTTTCTTCATGCCA
TAGAATATGGAAACTATGTCTATTTCTTCTTTCGAGAAATCGCTGTCGAACATAATAATTTAGGCAAGGCTGT
GTATTCCCGCGTGGCCCGCATATGTAAAAACCACATGGGTGGTTCCCAGCGGGTCCTGGAGAAACACTGGACT
TCATTTCTAAAGGCTCGGCTGAACTGTTCTGTCCCTGGAGATTCGTTTTTCTACTTTGATGTTCTGCAGTCTA
TTACAGACATAATACAAATCAATGGCATCCCCACTGTGGTCGGGGTGTTTACCACGCAGCTCAATAGCATCCC
TGGTTCTGCTGTCTGTGCATTTAGCATGGATGACATTGAAAAAGTATTCAAAGGACGGTTTAAGGAACAGAAA
ACTCCAGATTCTGTTTGGACAGCAGTTCCCGAAGACAAAGTGCCAAAGCCAAGGCCTGGCTGTTGTGCAAAAC
ACGGCCTTGCCGAAGCTTATAAAACCTCCATCGATTTCCCGGATGAAACTCTGTCATTCATCAAATCTCATCC
CCTGATGGACTCTGCCGTTCCACCCATTGCCGATGAGCCCTGGTTCACAAAGACTCGGGTCAGGTACAGACTC
ACGGCCATCTCAGTGGACCATTCAGCCGGACCCTACCAGAACTACACAGTCATCTTTGTTGGCTCTGAAGCTG
GCATGGTACTTAAAGTTCTGGCAAAGACCAGTCCTTTCTCTTTGAACGACAGCGTATTACTGGAAGAGATTGA
AGCCTACAACCATGCAAAGTGCAGTCCTGAGAATGAGGAAGACAAAAAGGTCATCTCATTACAGTTGGATAAA
GATCACCACGCTTTATATGTGCCGTTCTCTAGCTGCATTATCCGCATCCCCCTCAGTCCCTCTGAGCGTTATG
GATCATGTAAAAAGTCTTGTATTGCATCTCGTGACCCGTATTGTGGCTGGTTAAGCCAGGGATCCTGTGGTAG
AGTGACCCCAGGGATGCTGCTGTTAACCGAAGACTTCTTTGCTTTCCATAACCACAGTGCTGAAGGATATGAA
CAAGACACAGAATTCGGCAACACAGCTCATCTAGGGGACTGCCATGAAATTTTGCCTACTTCAACTACACCAG
ATTACAAAATATTTGGCGGTCCAACATCTGACATGGAGGTATCTTCATCTTCTGTTACCACAATGGCAAGTAT
CCCAGAAATCACACCTAAAGTGATTGATACCTGGACACCTAAACTGACAAGCTCTCGGAAATTTGTAGTTCAA
GATGATCCAAACACTTCTGATTTTACTGATCCTTTATCGCGTATCCCAAAGGGTGTACGATGGGAAGTCCAGT
CTGGAGAGTCCAACCAGATGGTCCACATGAATGTCCTCATCACCTGTGTCTTTGCTGCTTTTGTTTTGGGGGC
ATTCATTGCAGGTGTGGCAGTATACTGCTATCGAGACATGTTTGTTCGGAAAAACAGAAAGATCCATAAAGAT
GCAGAGTCCGCCCAGTCATGCACAGACTCCAGTGGAAGTTTTGCCAAACTGAATGGTCTCTTTGACAGCCCTG
TCAAGGAATACCAACAGAATATTGATTCTCCTAAACTGTATAGTAACCTGCTAACCAGTCGGAAAGAGCACGA
ATTCAGCGGCCGCTGAATTCTAG

| | | | |
|---|---|---|---|
| NOV16i, CG59253-07 | | | |
| Protein Sequence | SEQ ID NO: 212 | 1768 aa | MW at 86672.6kD |

MRVFLLCAYILLLMVSQLRAVSFPEDDEPLNTVDYHCKSSRQYPVFRGRPSGNESQHRLDFQLMLKIRDTLYI
AGRDQVYTVNLNEMPKTEVIWQQKLTWRSRQQDRENCAMKGKHKDECHNFIKVFVPRNDEMVFVCGTNAFNPM
CRYYRVSTLEYDGEEISGLARCPFDARQTNVALFADGKLYSATVADFLASDAVIYRSMGDGSALRTIKYDSKW
IKEPHFLHAIEYGNYVYFFFREIAVEHNNLGKAVYSRVARICKNDMGGSQRVLEKHWTSFLKARLNCSVPGDS
FFYFDVLQSITDIIQINGIPTVVGVFTTQLNSIPGSAVCAFSMDDIEKVFKGRFKEQKTPDSVWTAVPEDKVP
KPRPGCCAKHGLAEAYKTSIDFPDETLSFIKSHPLMDSAVPPIADEPWFTKTRVRYRLTAISVDHSAGPYQNY
TVIFVGSEAGMVLKVLAKTSPFSLNDSVLLEEIEAYNHAKCSAENEEDKKVISLQLDKDHHALYVAFSSCIIR
IPLSRCERYGSCKKSCIASRDPYCGWLSQGSCGRVTPGMLLLTEDFFAFHNHSAEGYEQDTEFGNTAHLGDCH
EILPTSTTPDYKIFGGPTSDMEVSSSSVTTMASIPEITPKVIDTWRPKLTSSRKFVVQDDPNTSDFTDPLSGI
PKGVRWEVQSGESNQMVHMNVLITCVFAAFVLGAFIAGVAVYCYRDMFVRKNRKIHKDAESAQSCTDSSGSFA
KLNGLFDSPVKEYQQNIDSPKLYSNLLTSRKEHEFSGR

| | | |
|---|---|---|
| NOV16j, CG59253-08 | SEQ ID NO: 213 | 3364 bp |
| DNA Sequence | ORF Start: ATG at 46 | ORF Stop: TAG at 3310 |

TGGCATTTCTGAGCAGGGGCCACCCTGACTTCACCTTGGCCCACCATGAGGGTCTTCCTGCTTTGTGCCTACA
TACTGCTGCTGATGGTTTCCCAGTTGAGGGCAGTCAGCTTTCCTGAAGATGATGAACCCCTTAATACTGTCGA
CTATCACTGTAAGTCGTCTAGGCAATATCCGGTTTTTAGAGGACGCCCTTCAGGCAATCAATCGCAGCACAGG
CTGGACTTTCAGCTGATGTTGAAAATTCGAGACACACTTTATATTGCTGGCAGGGATCAAGTTTATACAGTAA
ACTTAAATGAAATGCCCAAAACAGAAGTAATATGGCAACAGAAACTGACATGGCCATCAAGACAACAGGATCG
AGAAAACTGTGCTATGAAAGGCAAGCATAAAGATGAATGCCACAACTTTATCAAAGTATTTGTTCCAAGAAAC
GATGAGATGGTTTTTGTTTGTGGTACCAATGCATTCAATCCCATGTGTAGATACTACAGGGTAAGTACCTTAG
AATATGATGGGGAAGAAATTAGTGGCCTGGCAAGATGCCCATTTGATGCCAGACAAACCAATGTTGCCCTCTT
TGCTGATGGGAAGCTGTATTCTGCCACAGTGGCTGACTTCTTGGCCAGCGATGCCGTTATTTATCGAAGCATG
GGTGATGGATCTCCCCTTCGCACAATAAAATATGATTCCAAATGGATAAAAGAGCCACACTTTCTTCATGCCA
TAGAATATGGAAACTATGTCTATTTCTTCTTTCGAGAAATCGCTGTCGAACATAATAATTTAGGCAAGGCTGT
GTATTCCCGCGTGGCCCGCATATGTAAAAACGACATGGGTGGTTCCCAGCGGGTCCTCGAGAAACACTGGACT
TCATTTCTAAAGGCTCGGCTGAACTGTTCTGTCCCTGGAGATTCGTTTTTCTACTTTGATGTTCTGCAGTCTA
TTACAGACATAATACAAATCAATGGCATCCCCACTGTGGTCGGGGTGTTTACCACGCAGCTCAATAGCATCCC
TGGTTCTGCTGTCTGTGCATTTAGCATGGATGACATTGAAAAAGTATTCAAAGGACGGTTTAAGGAACAGAAA
ACTCCAGATTCTGTTTGGACAGCAGTTCCCGAAGACAAAGTGCCAAAGCCAAGGCCTGGCTGTTGTGCAAAAC
ACGGCCTTGCCGAAGCTTATAAAACCTCCATCGATTTCCCGGATGAAACTCTGTCATTCATCAAATCTCATCC
CCTGATGGACTCTGCCGTTCCACCCATTGCCGATGAGCCCTGGTTCACAAAGACTCGGGTCAGGTACAGACTG
ACGGCCATCTCAGTGGACCATTCAGCCGGACCCTACCAGAACTACACAGTCATCTTTGTTGGCTCTGAAGCTG
GCATGGTACTTAAAGTTCTGGCAAAGACCAGTCCTTTCTCTTTGAACGACAGCGTATTACTGGAAGAGATTGA
AGCCTACAACCATGCAAAGTGCAGTGCTGAGAATGAGGAAGACAAAAAGGTCATCTCATTACAGTTGGATAAA
GATCACCACGCTTTATATGTGGCGTTCTCTAGCTGCATTATCCGCATCCCCCTCAGTCGCTGTGAGCGTTATG
GATCATGTAAAAAGTCTTGTATTGCATCTCGTGACCCGTATTGTGGCTGGTTAAGCCAGGGATCCTGTGGTAG
AGTCACCCCAGGGATGCTGCTGTTAACCGAAGACTTCTTTGCTTTCCATAACCACAGTGCTCAACGATATGAA
CAAGACACAGAATTCGGCAACACAGCTCATCTAGGGGACTGCCATGAAATTTTGCCTACTTCAACTACACCAG
ATTACAAAATATTTGGCGGTCCAACATCTGACATGGAGGTATCTTCATCTTCTGTTACCACAATGGCAAGTAT
CCCAGAAATCACACCTAAAGTGATTGATACCTGGACACCTAAACTGACAAGCTCTCGGAAATTTGTAGTTCAA
GATGATCCAAACACTTCTGATTTTACTGATCCTTTATCGGGTATCCCAAAGGGTGTACGATGGGAAGTCCAGT
CTGGAGAGTCCAACCAGATGGTCCACATGAATGTCCTCATCACCTGTGTCTTTGCTGCTTTTGTTTTGGGGGC
ATTCATTGCAGGTGTGGCAGTATACTGCTATCGAGACATGTTTGTTCGGAAAAACAGAAAGATCCATAAAGAT
GCAGAGTCCGCCCAGTCATGCACAGACTCCAGTGGAAGTTTTGCCAAACTGAATGGTCTCTTTCACAGCCCTG
TCAAGGAATACCAACAGAATATTGATTCTCCTAAACTGTATAGTAACCTGCTAACCAGTCGGAAAGAGCTACC
ACCCAATGGAGATACTAAATCCATGGTAATGGACCATCGAGGGCAACCTCCAGAGTTGGCTGCTCTTCCTACT
CCTGAGTCTACACCCGTGCTTCACCAGAAGACCCTGCAGGCCATCAAGAGCCACTCAGAAAAGGCCCATGGCC
ATGGAGCTTCAAGGAAAGAAACCCCTCAGTTTTTTCCGTCTAGTCCGCCACCTCATTCCCCATTAAGTCATGG
GCATATCCCCAGTGCCATTGTTCTTCCAAATGCTACCCATGACTACAACACGTCTTTCTCAAACTCCAATGCT
CACAAAGCTGAAAAGAAGCTTCAAAACATTGATCACCCTCTCACAAAGTCATCCAGTAAGAGAGATCACCGGC
GTTCTGTTGATTCCAGAAATACCCTCAATGATCTCCTGAAGCATCTGAATGACCCAAATAGTAACCCCAAAGC
CATCATGGGAGACATCCAGATGGCACACCAGAACTTAATGCTGGATCCCATGGGATCGATGTCTGAGGTCCCA
CCTAAAGTCCCTAACCGGGAGGCATCGCTATACTCCCCTCCTTCAACTCTCCCCAGAAATACCCCAACCAAGC
GAGTCCATGTCCCCACCACTCCTGGAGTCCCAATGACTTCTCTGGAAAGACAAAGAGGTTATCACAAAAATTC
CTCCCAGAGGCACTCTATATCTGCTATGCCTAAAAACTTAAACTCACCAAATCCTGTTTTGTTATCCAGACAG
CCTAGTATGAACCGTGGAGGATATATGCCCACCCCCACTGGGGCGAAGGTGGACTATATTCAGGGAACACCAG
TGAGTGTTCATCTGCAGCCTTCCCTCTCCAGACAGAGCAGCTACACCAGTAATGGCACTCTTCCTAGGACGGG
ACTAAAGAGGACGCCGTCCTTAAAACCTGACGTGCCACCAAAGCCTTCCTTTGTTCCTCAAACCCCATCTGTC
AGACCACTGAACAAATACACATACTAGGCCTCAAGTCTGCTATTCCCATGTGGCTTTATCCTGTCCGTGTTGT
TGAGAG

| | | | |
|---|---|---|---|
| NOV16j, CG59253-08 | | | |
| Protein Sequence | SEQ ID NO: 214 | 1088 aa | MW at 121674.9kD |

MRVFLLCAYILLLMVSQLRAVSFPEDDEPLNTVDYHCKSSRQYPVFRGRPSGNESQHRLDFQLMLKIRDTLYI
AGRDQVYTVNLNEMPKTEVIWQQKLTWRSRQQDRENCAMKGKHKDECHNFIKVFVPRNDEMVFVCGTNAFNPM
CRYYRVSTLEYDGEEISGLARCPFDARQTNVALFADGKLYSATVADFLASDAVIYRSMGDGSALRTIKYDSKW
IKEPHFLHAIEYGNYVYFFFREIAVEHNNLGKAVYSRVARICKNDMGGSQRVLEKHWTSFLKARLNCSVPGDS
FFYFDVLQSITDIIQINCIPTVVGVFTTQLNSIPGSAVCAFSMDDIEKVFKGRFKEQKTPDSVWTAVPEDKVP
KPRPGCCAKHGLAEAYKTSIDFPDETLSFIKSHPLMDSAVPPIADEPWFTKTRVRYRLTAISVDHSAGPYQNY
TVIFVGSEAGMVLKVLAKTSPFSLNDSVLLEEIEAYNHAKCSAENEEDKKVISLQLDKDHHALYVAFSSCIIR
IPLSRCERYGSCKKSCIASRDPYCGWLSQCSCGRVTPGMLLLTEDFFAFHNHSAEGYEQDTEFGNTAHLGDCH
EILPTSTTPDYKIFGGPTSDMEVSSSSVTTMASIPEITPKVIDTWRPKLTSSRKFVVQDDPNTSDFTDPLSGI
PKGVRWEVQSGESNQMVHMNVLITCVFAAFVLGAFIAGVAVYCYRDMFVRKNRKIHKDAESAQSCTDSSGSFA
KLNGLFDSPVKEYQQNIDSPKLYSNLLTSRKELPPNGDTKSMVMDHRGQPPELAALPTPESTPVLHQKTLQAM
KSHSEKAHGHGASRKETPQFFPSSPPPHSPLSHGHIPSAIVLPNATHDYNTSFSNSNAHKAEKKLQNIDHPLT
KSSSKRDHRRSVDSRNTLNDLLKHLNDPNSNPKAIMGDIQMAHQNLMLDPMGSMSEVPPKVPNREASLYSPPS
TLPRNSPTKRVDVPTTPGVPMTSLERQRGYHKNSSQRHSISAMPKNLNSPNGVLLSRQPSMNRGGYMPTPTGA
KVDYIQGTPVSVHLQPSLSRQSSYTSNGTLPRTGLKRTPSLKPDVPPKPSFVPQTPSVRPLNKYTY

| | | |
|---|---|---|
| NOV16k, CG59253-09 | SEQ ID NO: 215 | 3231 bp |
| DNA Sequence | ORF Start: ATG at 10 | ORF Stop: TGA at 3229 |

CGCAGATCTATGAGGGTCTTCCTGCTTTGTGCCTACATACTGCTGCTGATGGTTTCCCAGTTGAGGGCAGTCA
GCTTTCCTGAAGATGATGAACCCCTTAATACTGTCGACTATCACTATTCAACGCAATATCCGGTTTTTAGAGG
ACGCCCTTCAGGCAATGAATCGCAGCACAGGCTGGACTTTCAGCTGATGTTGAAAATTCGAGACACACTTTAT
ATTGCTGGCAGGGATCAAGTTTATACAGTAAACTTAAATGAAATGCCCAAAACAGAAGTAATACCAAACAAGA
AACTGACATGGCGATCAAGACAACAGGATCGAGAAAACTGTGCTATGAAAGGCAAGCATAAAGATGAATGCCA
CAACTTTATCAAAGTATTTGTTCCAAGAAACGATGAGATGGTTTTTGTTTGTGGTACCAATGCATTCAATCCC
ATGTGTAGATACTACAGGTTGAGTACCTTAGAATATGATGGGGAAGAAATTAGTGGCCTGGCAAGATGCCCAT
TTGATGCCAGACAAACCAATGTTGCCCTCTTTCCTGATGGGAAGCTGTATTCTGCCACAGTGGCTGACTTCTT
GGCCAGCGATGCCGTTATTTATCGAAGCATGGGTGATGGATCTGCCCTTCGCACAATAAAATATGATTCCAAA
TGGATAAAAGAGCCACACTTTCTTCATGCCATAGAATATGGAAACTATGTCTATTTCTTCTTTCGAGAAATCG
CTGTCCAACATAATAATTTAGGCAAGGCTGTGTATTCCCGCGTGGCCCGCATATGTAAAAACGACATGGGTGG
TTCCCAGCGGGTCCTGGACAAACACTGGACTTCATTTCTAAAGGCTCGGCTGAACTGTTCTGTCCCTGGAGAT
TCGTTTTTCTACTTTGATGTTCTGCAGTCTATTACAGACATAATACAAATCAATGGCATCCCCACTGTGGTCG
GGGTGTTTACCACGCAGCTCAATAGCATCCCTGGTTCTCCTGTCTGTGCATTTAGCATGGATGACATTGAAAA
AGTATTCAAAGGACGGTTTAAGGAACAGAAAACTCCAGATTCTGTTTGGACAGCAGTTCCCGAAGACAAAGTG
CCAAAGCCAAGGCCTGGCTGTTGTGCAAAACACGGCCTTGCCGAAGCTTATAAAACCTCCATCGATTTCCCGG
ATGAAACTCTGTCATTCATCAAATCTCATCCCCTGATGGACTCTGCCGTTCCACCCATTGCTGATGAGCCCTG
GTTCACAAAGACTCGGGTCAGGTACAGACTGACGCCCATCTCAGTGGACCATTCAGCCGGACCCTACCAGAAC
TACACACTCATCTTTGTTGGCTCTGAAGCTGGCATGGTACTTAAAGTTCTGCCAAAGACCAGTCCTTTCTCTT
TGAACGACAGCGTATTACTGGAAGAGATTGAAGCCTACAACCATGCAAAGTGCAGTGCTGAGAATGAGGAAGA
CAAAAAGGTCATCTCATTACAGTTGGATAAACATCACCACGCTTTATATGTGGCGTTCTCTAGCTGCATTATC
CGCATCCCCCTCAGTCGCTGTGAGCGTTATGGATCATGTAAAAAGTCTTGTATTGCATCTCGTGACCCCTATT
GTGGCTGGTTAAGCCAGGGATCCTGTGGTAGAGTGACCCCAGGGATGCTTGCTGAAGGATATGAACAAGACAC
AGAATTCGGCAACACACCTCATCTAGGGGACTGCCATGAAATTTTGCCTACTTCAACTACACCAGATTACAAA
ATATTTGGCGGTCCAACATCTGACATGGAGGTATCTTCATCTTCTGTTACCACAATGGCAAGTATCCCAGAAA
TCACACCTAAAGTGATTGATACCTGGAGACCTAAACTGACAAGCTCTCGGAAATTTGTAGTTCAAGATGATCC
AAACACTTCTCATTTTACTGATCCTTTATCGGGTATCCCAAAGGGTGTACGATGCGAAGTCCAGTCTGGAGAG
TCCAACCAGATCGTCCACATGAATGTCCTCATCACCTGTGTCTTTGCTGCTTTTGTTTTGGGGGCATTCATTG
CAGGTGTGGCAGTATACTGCTATCGAGACATGTTTGTTCGGAAAAACAGAAAGATCCATAAAGATCCAGAGTC
CGCCCAGTCATGCACAGACTCCAGTGGAAGTTTTGCCAAACTGAATGGTCTCTTTGACAGCCCTGTCAAGGAA
TACCAACAGAATATTGATTCTCCTAAACTGTATAGTAACCTGCTAACCAGTCGCAAAGAGCTACCACCCAATG
GAGATACTAAATCCATCCTAATGGACCATCGAGGGCAACCTCCAGAGTTGGCTGCTCTTCCTACTCCTGAGTC
TACACCCGTGCTTCACCAGAAGACCCTGCAGGCCATGAAGAGCCACTCAGAAAAGGCCCATGGCCATGGAGCT
TCAAGGAAAGAAACCCCTCAGTTTTTTCCGTCTAGTCCGCCACCTCATTCCCCATTAAGTCATGGGCATATCC
CCAGTGCCATTGTTCTTCCAAATGCTACCCATGACTACAACACGTCTTTCTCAAACTCCAATGCTCACAAAGC
TGAAAAGAAGCTTCAAAACATTGATCACCCTCTCACAAAGTCATCCAGTAAGAGAGATCACCGGCGTTCTGTT
GATTCCAGAAATACCCTCAATGATCTCCTGAAGCATCTGAATGACCCAAATAGTAACCCCAAAGCCATCATGG
GAGACATCCAGATGGCACACCACAACTTAATGCTGGATCCCATGGGATCGATGTCTGAGGTCCCACCTAAAGT
CCCTAACCGGGAGGCATCGCTATACTCCCCTCCTTCAACTCTCCCCAGAAATAGCCCAACCAAGCGAGTGGAT
GTCCCCACCACTCCTGCAGTCCCAATGACTTCTCTGGAAAGACAAAGAGGTTATCACAAAAATTCCTCCCAGA
GGCACTCTATATCTCCTATGCCTAAAAACTTAAACTCACCAAATGGTGTTTTGTTATCCAGACACCCTAGTAT
GAACCGTGGAGGATATATGCCCACCCCCACTGGGGCGAAGGTGGACTATATTCAGGGAACACCAGTGAGTGTT
CATCTGCAGCCTTCCCTCTCCACACACACCAGCTACACCAGTAATGGCACTCTTCCTAGCACGGGACTAAAGA
GGACGCCGTCCTTAAAACCTGACGTGCCACCAAAGCCTTCCTTTGTTCCTCAAACCCCATCTGTCAGACCACT
GAACAAATACACATACTGA

| | | | |
|---|---|---|---|
| NOV16k, CG59253-09 | | | |
| Protein Sequence | SEQ ID NO: 216 | 1073 aa | MW at 119870.9kD |

MRVFLLCAYILLLMVSQLRAVSFPEDDEPLNTVDYHYSRQYPVFRGRPSGNESQHRLDFQLMLKIRDTLYIAG
RDQVYTVNLNEMPKTEVIPNKKLTWRSRQQDRENCAMKGKHKDECHNFIKVFVPRNDEMVFVCCTNAFNPMCR
YYRLSTLEYDGEEISGLARCPFDARQTNVALFADGKLYSATVADFLASDAVIYRSMGDGSALRTIKYDSKWIK
EPHFLHAIEYGNYVYFFFREIAVEHNNLGKAVYSRVARICKNDMGGSQRVLEKHWTSFLKARLNCSVPGDSFF
YFDVLQSITDIIQINGIPTVVGVFTTQLNSIPGSAVCAFSMDDIEKVFKGRFKEQKTPDSVWTAVPEDKVPKP
RPGCCAKHGLAEAYKTSIDFPDETLSFIKSHPLMDSAVPPIADEPWFTKTRVRYRLTAISVDHSACPYQNYTV
IFVGSEAGMVLKVLAKTSPFSLNDSVLLEEIEAYNHAKCSAENEEDKKVISLQLDKDHHALYVAFSSCITRIP
LSRCERYGSCKKSCIASRDPYCGWLSQGSCGRVTPGMLAEGYEQDTEFGNTAHLGDCHEILPTSTTPDYKIFG
GPTSDMEVSSSSVTTMASIPEITPKVIDTWRPKLTSSRKFVVQDDPNTSDFTDPLSGIPKGVRWEVQSGESNQ
MVHMNVLITCVFAAFVLGAFIAGVAVYCYRDMFVRKNRKIHKDAESAQSCTDSSGSFAKLNGLFDSPVKEYQQ
NIDSPKLYSNLLTSRKELPPNGDTKSMVMDHRGQPPELAALPTPESTPVLHQKTLQAMKSHSEKAHGHGASRK
ETPQFFPSSPPPHSPLSHGHIPSAIVLPNATHDYNTSFSNSNAHKAEKKLQNIDHPLTKSSSKRDHRRSVDSR
NTLNDLLKHLNDPNSNPKAIMGDIQMAHQNLMLDPMGSMSEVPPKVPMREASLYSPPSTLPRNSPTKRVDVPT
TPGVPMTSLERQRGYHKNSSQRHSISAMPKNLNSPNGVLLSRQPSMNRGGYMPTPTGAKVDYIQGTPVSVHLQ
PSLSRQSSYTSNGTLPRTGLKRTPSLKPDVPPKPSFVPQTPSVRPLNKYTY

| | | |
|---|---|---|
| NOV16l, CG59253-10 | SEQ ID NO: 217 | 1950 bp |
| DNA Sequence | ORF Start: at 10 | ORF Stop: at 1942 |

CGCAGATCTGTCAGCTTTCCTGAAGATGATGAACCCCTTAATACTGTCGACTATCACTATTCAAGGCAATATC
CGGTTTTTAGAGGACGCCCTTCAGCCAATGAATCGCAGCACAGGCTGGACTTTCAGCTGATGTTGAAAATTCG
AGACACACTTTATATTGCTGGCAGGGATCAAGTTTATACAGTAAACTTAAATGAAATCCCCAAAACAGAACTA
ATACCCAACAAGAAACTGACATGGCGATCAAGACAACAGGATCGAGAAAACTGTGCTATGAAAGGCAAGCATA
AAGATGAATGCCACAACTTTATCAAAGTATTTGTTCCAAGAAACGATGAGATGGTTTTTGTTTGTGGTACCAA
TGCATTCAATCCCATGTGTAGATACTACAGGTTGAGTACCTTAGAATATGATGGGGAAGAAATTAGTGGCCTG
GCAAGATGCCCATTTGATGCCAGACAAACCAATCTTGCCCTCTTTGCTGATGGGAAGCTGTATTCTGCCACAG
TGGCTGACTTCTTGGCCAGCGATGCCGTTATTTATCGAAGCATGGGTGATGGATCTGCCCTTCGCACAATAAA
ATATGATTCCAAATGGATAAAAGAGCCACACTTTCTTCATGCCATAGAATATGGAAACTATGTCTATTTCTTC
TTTCGAGAAATCGCTGTCGAACATAATAATTTAGGCAAGCCTGTGTATTCCCGCGTGGCCCGCATATGTAAAA
ACGACATGGGTGGTTCCCAGCGGGTCCTGGAGAAACACTGGACTTCATTTCTAAAGGCTCGGCTGAACTGTTC
TGTCCCTGGAGATTCGTTTTTCTACTTTGATGTTCTGCAGTCTATTACAGACATAATACAAATCAATGGCATC
CCCACTGTGGTCGGGGTGTTTACCACGCAGCTCAATAGCATCCCTGGTTCTGCTGTCTGTGCATTTAGCATGG
ATGACATTGAAAAAGTATTCAAACGACGGTTTAAGGAACAGAAAACTCCAGATTCTGTTTGGACAGCAGTTCC
CGAAGACAAAGTGCCAAAGCCAAGGCCTGGCTGTTGTGCAAAACACGGCCTTGCCGAAGCTTATAAAACCTCC
ATCGATTTCCCGGATGAAACTCTGTCATTCATCAAATCTCATCCCCTGATGGACTCTCCCGTTCCACCCATTG
CTGATGAGCCCTGGTTCACAAAGACTCGGGTCAGGTACAGACTGACGGCCATCTCAGTGGACCATTCAGCCGG
ACCCTACCAGAACTACACAGTCATCTTTGTTGGCTCTGAAGCTGCCATGGTACTTAAAGTTCTGGCAAAGACC
AGTCCTTTCTCTTTGAACGACAGCGTATTACTGGAAGAGATTGAAGCCTACAACCATGCAAAGTGCAGTGCTG
AGAATGAGGAAGACAAAAAGGTCATCTCATTACAGTTGGATAAAGATCACCACGCTTTATATGTGGCGTTCTC
TAGCTGCATTATCCGCATCCCCCTCAGTCGCTGTGAGCGTTATGGATCATCTAAAAAGTCTTGTATTGCATCT
CGTGACCCGTATTGTGGCTGGTTAAGCCAGGGATCCTGTGGTAGAGTGACCCCAGGGATGCTGCTGTTAACCG
AAGACTTCTTTGCTTTCCATAACCACAGTGCTGAAGGATATGAACAAGACACAGAATTCGGCAACACACCTCA
TCTAGGGGACTGCCATGAAATTTTGCCTACTTCAACTACACCAGATTACAAAATATTTGGCGGTCCAACATCT
GACATGGAGGTATCTTCATCTTCTGTTACCACAATGGCAAGTATCCCAGAAATCACACCTAAAGTGATTGATA
CCTGGAGACCTAAACTGACAAGCTCTCGGAAATTTGTAGTTCAAGATGATCCAAACACTTCTGATTTTACTGA
TCCTTTATCGGGTATCCCAAAGGGTGTACGATGGGAAGTCCAGCTCGAGGCG

| | | | |
|---|---|---|---|
| NOV16l, CG59253-10 | | | |
| Protein Sequence | SEQ ID NO: 218 | 644 aa | MW at 72707.5kD |

VSFPEDDEPLNTVDYHYSRQYPVFRGRPSGNESQHRLDFQLMLKIRDTLYIAGRDQVYTVNLNEMPKTEVIPN
KKLTWRSRQQDRENCAMKGKHKDECHNFIKVFVPRNDEMVFVCGTNAFNPMCRYYRLSTLEYDGEEISGLARC
PFDARQTNVALFADGKLYSATVADFLASDAVIYRSMGDGSALRTIKYDSKWIKEPHFLHAIEYGNYVYFFFRE
IAVEHNNLGKAVYSRVARICKNDMGGSQRVLEKHWTSFLKARLNCSVPGDSFFYFDVLQSITDIIQINGIPTV
VGVFTTQLNSIPGSAVCAFSMDDIEKVFKGRFKEQKTPDSVWTAVPEDKVPKPRPGCCAKHGLAEAYKTSIDF
PDETLSFIKSHPLMDSAVPPIADEPWFTKTRVRYRLTAISVDHSAGPYQNYTVIFVGSEAGMVLKVLAKTSPF
SLNDSVLLEEIEAYNHAKCSAENEEDKKVISLQLDKDHHALYVAFSSCIIRIPLSRCERYGSCKKSCLASRDP
YCGWLSQCSCGRVTPGMLLLTEDFFAFHNHSAEGYEQDTEFGNTAHLGDCHEILPTSTTPDYKIFGGPTSDME
VSSSSVTTMASIPEITPKVIDTWRPKLTSSRKFVVQDDPNTSDFTDPLSGIPKGVRWEVQ

| | | |
|---|---|---|
| | SEQ ID NO: 219 | 1894 bp |
| NOV16m, SNP13381547 of | ORF Start: ATG at 46 | ORF Stop: TAG at 1474 |
| CG59253-01, DNA Sequence | SNP Pos: 215 | SNP Change: T to C |

TGGCATTTCTGAGCAGGGGCCACCCTGACTTCACCTTGGCCCACCATGAGGGTCTTCCTGCTTTGTGCCTACA
TACTGCTGCTGATGGTTTCCCAGTTGAGGGCAGTCAGCTTTCCTGAAGATGATGAACCCCTTAATACTGTCGA
CTATCACTATTCAAGGCAATATCCGGTTTTTAGAGGACCCCCTTCAGGCAATGAATCGCAGCACAGGCCGGAC
TTTCAGCTGATGTTGAAAATTCGAGACACACTTTATATTGCTGGCAGGGATCAAGTTTATACAGTAAACTTAA
ATGAAATGCCCAAAACAGAAGTAATACCCAACAAGAAACTGACATGGCGATCAAGACAACAGGATCGAGAAAA
CTGTGCTATGAAAGGCAAGCATAAAGATGAATGCCACAACTTTATCAAAGTATTTGTTCCAAGAAACGATGAG
ATGGTTTTTGTTTGTGGTACCAATCCATTCAATCCCATGTGTAGATACTACAGGTTGAGTACCTTAGAATATG
ATGGGGAAGAAATTAGTGGCCTGGCAAGATGCCCATTTCATGCCAGACAAACCAATGTTGCCCTCTTTGCTGA
TGGGAAGCTGTATTCTGCCACAGTGGCTGACTTCTTGGCCAGCGATGCCGTTATTTATCGAAGCATGGGTGAT
GCATCTGCCCTTCGCACAATAAAATATGATTCCAAATGGATAAAAGAGCCACACTTTCTTCATGCCATAGAAT
ATGGAAACTATGTCTATTTCTTCTTTCGAGAAATCGCTGTCGAACATAATAATTTAGGCAAGGCTGTGTATTC
CCGCGTGGCCCGCATATGTAAAAACGACATGGGTGGTTCCCACCGGGTCCTGGAGAAACACTGGACTTCATTT
CTAAAGGCTCGGCTGAACTGTTCTGTCCCTGGAGATTCGTTTTTCTACTTTGATGTTCTGCAGTCTATTACAG
ACATAATACAAATCAATGGCATCCCCACTGTGGTCGGGGTGTTTACCACGCACCTCAATAGCATCCCTGGTTC
TGCTGTCTGTGCATTTAGCATGGATGACATTGAAAAAGTATTCAAAGGACGGTTTAAGGAACAGAAAACTCCA
GATTCTGTTTCGACAGCAGTTCCCGAAGACAAAGTGCCAAAGCCAAGGCCTGGCTGTTGTCCAAAACACGGCC
TTGCCGAACCTTATAAAACCTCCATCGATTTCCCGGATGAAACTCTGTCATTCATCAAATCTCATCCCCTGAT
GGACTCTGCCGTTCCACCCATTGCCGATGAGCCCTGGTTCACAAAGACTCGGGTCAGGTACAGACTGACGGCC
ATCTCAGTGGACCATTCAGCCGGACCCTACCAGAACTACACAGTCATCTTTGTTGGCTCTGAAGCTGGCATGG
TACTTAAAGTTCTGGCAAAGACCAGTCCTTTCTCTTTGAACCACAGCGTATTACTGGAAGAGATTGAAGCCTA
CAACCATGCAAAGTAGGTATATGTTACGAGAACGCCCTTCAGCACTGCTCAAAAATTTTCGGCATGTATTTCA
TCTAGTCATGTCCTTTTGGTCCTCTAAATTAGCAGTGGTTTGGCATAATAGTGTTTTGTGTTTTTTTTCTCAT
TGAAATAAATCTTGGGTTTGTTTTTTTCCCGAGCCTGCTAGGGCGAGGGGGGTGAATGGTTGATGAGTTTAAA
AATAATGCAGCCCTTGTTTTTCACCTGTAGAATATGAGAACATTTTAACAGCACCTCTCTTATCTTGCAGATA
TATTCCAAGATGCTACATGCAGCAGACAGCTGTGAGCTTGCATACACACACACACAAATATACATGCACATAC
ATACACAGAATGTAGTACTAGTTAAGTATTTCCTTCCTATCTTTAATAAGTAAGAGAATATTTAGACCA

| | | | |
|---|---|---|---|
| NOV16m, SNP13381547 of | SEQ ID NO: 220 | | MW at 54200.4kD |
| CG59253-01, Protein Sequence | SNP Pos: 57 | 476 aa | SNP Change: Len to Pro |

MRVFLLCAYILLLMVSQLRAVSFPEDDEPLNTVDYHYSRQYPVFRGRPSGNESQHRPDFQLMLKIRDTLYIAG
RDQVYTVNLNEMPKTEVIPNKKLTWRSRQQDRENCANKGKHKDECHNFIKVFVPRNDEMVFVCGTNAFNPMCR
YYRLSTLEYDGEEISGLARCPFDARQTNVALFADGKLYSATVADFLASDAVIYRSMGDGSALRTIKYDSKWIK
EPHFLHAIEYGNYVYFFFREIAVEHNNLGKAVYSRVARICKNDMGGSQRVLEKHWTSFLKARLNCSVPGDSFF
YFDVLQSITDIIQINGIPTVVGVFTTQLNSIPGSAVCAFSMDDIEKVFKGRFKEQKTPDSVWTAVPEDKVPKP
RPGCCAKHGLAEAYKTSIDFPDETLSFIKSHPLMDSAVPPIADEPWFTKTRVRYRLTAISVDHSAGPYQNYTV
IFVGSEAGMVLKVLAKTSPFSLNDSVLLEEIEAYNHAK

| | | |
|---|---|---|
| | SEQ ID NO: 221 | 1894 bp |
| NOV16n, SNP13378936 of | ORF Start: ATG at 46 | ORF Stop: TAG at 1474 |
| CG59253-01, DNA Sequence | SNP Pos: 865 | SNP Change: T to C |

TGGCATTTCTGAGCAGGGGCCACCCTGACTTCACCTTGGCCCACCATGAGGGTCTTCCTGCTTTGTGCCTACA
TACTGCTCCTGATGGTTTCCCAGTTGAGGGCAGTCAGCTTTCCTGAAGATGATGAACCCCTTAATACTGTCGA
CTATCACTATTCAAGGCAATATCCGGTTTTTAGAGGACGCCCTTCAGGCAATGAATCGCAGCACAGGCTGGAC
TTTCAGCTGATGTTGAAAATTCGAGACACACTTTATATTGCTGGCAGGGATCAAGTTTATACAGTAAACTTAA
ATGAAATGCCCAAAACAGAAGTAATACCCAACAAGAAACTGACATGGCGATCAAGACAACAGGATCGAGAAAA
CTGTGCTATGAAAGGCAAGCATAAAGATGAATGCCACAACTTTATCAAAGTATTTGTTCCAAGAAACGATGAG
ATGGTTTTTGTTTGTGGTACCAATGCATTCAATCCCATGTGTAGATACTACAGGTTGAGTACCTTAGAATATG
ATGGGGAAGAAATTAGTGGCCTGGCAAGATGCCCATTTGATGCCAGACAAACCAATGTTGCCCTCTTTGCTGA
TGGGAAGCTGTATTCTGCCACAGTGGCTGACTTCTTGGCCAGCCATGCCGTTATTTATCGAAGCATGGGTGAT
GGATCTGCCCTTCGCACAATAAAATATGATTCCAAATGGATAAAAGAGCCACACTTTCTTCATGCCATAGAAT
ATGGAAACTATGTCTATTTCTTCTTTCGAGAAATCGCTGTCGAACATAATAATTTAGGCAAGGCTGTGTATTC
CCGCGTGGCCCGCATATGTAAAAACGACATGGGTGGTTCCCAGCCGGTCCTGGAGAAACACCGGACTTCATTT
CTAAAGGCTCGGCTGAACTGTTCTGTCCCTGGAGATTCGTTTTTCTACTTTGATGTTCTGCAGTCTATTACAG
ACATAATACAAATCAATGGCATCCCCACTGTGGTCGGGGTGTTTACCACGCAGCTCAATAGCATCCCTGGTTC
TGCTGTCTGTGCATTTAGCATGGATGACATTGAAAAAGTATTCAAAGGACGGTTTAAGGAACAGAAAACTCCA
GATTCTGTTTGGACAGCAGTTCCCGAAGACAAAGTGCCAAAGCCAAGGCCTGGCTGTTGTGCAAAACACGGCC
TTGCCGAAGCTTATAAAACCTCCATCGATTTCCCGGATGAAACTCTGTCATTCATCAAATCTCATCCCCTGAT
GGACTCTCCCGTTCCACCCATTGCCGATCAGCCCTGGTTCACAAAGACTCGGGTCAGGTACAGACTGACGGCC
ATCTCAGTGCACCATTCAGCCCGACCCTACCAGAACTACACAGTCATCTTTGTTGGCTCTGAAGCTGGCATGG
TACTTAAAGTTCTGGCAAAGACCAGTCCTTTCTCTTTGAACGACAGCGTATTACTGGAAGAGATTGAAGCCTA
CAACCATGCAAAGTAGGTATATGTTACGAGAACGCCCTTCAGCACTGCTCAAAAATTTTCGGCATGTATTTCA
TCTAGTCATGTCCTTTTGGTCCTCTAAATTAGCAGTGGTTTGGCATAATAGTGTTTTGTGTTTTTTTTCTCAT
TGAAATAAATCTTGGGTTTGTTTTTTTCCCGAGCCTGCTAGGGCGAGGGGGGTGAATGGTTGATGAGTTTAAA
AATAATGCAGCCCTTGTTTTTCACCTGTAGAATATGAGAACATTTTAACAGCACCTCTCTTATCTTGCAGATA
TATTCCAAGATGCTACATGCAGCAGACAGCTGTGAGCTTGCATACACACACACACAAATATACATGCACATAC
ATACACAGAATGTAGTACTAGTTAAGTATTTCCTTCCTATCTTTAATAAGTAAGAGAATATTTAGACCA

| | | | |
|---|---|---|---|
| NOV16n, SNP13378936 of | SEQ ID NO: 222 | | MW at 541 86.4kD |
| CG59253-01, Protein Sequence | SNP Pos: 274 | 476 aa | SNP Change: Trp to Arg |

MRVFLLCAYILLLMVSQLRAVSFPEDDEPLNTVDYHYSRQYPVFRGRPSGNESQHRLDFQLMLKIRDTLYIAG
RDQVYTVNLNEMPKTEVIPNKKLTWRSRQQDRENCAMKGKHKDECHNFIKVFVPRNDEMVFVCGTNAFNPMCR
YYRLSTLEYDGEEISGLARCPFDARQTNVALFADGKLYSATVADFLASDAVIYRSMGDGSALRTIKYDSKWIK
EPHFLHAIEYGNYVYFFFREIAVEHNNLGKAVYSRVARICKNDMGGSQRVLEKHRTSFLKARLNCSVPGDSFF
YFDVLQSITDIIQINGIPTVVGVFTTQLNSIPGSAVCAFSMDDIEKVFKGRFKEQKTPDSVWTAVPEDKVPKP
RPGCCAKHGLAEAYKTSIDFPDETLSFIKSHPLMDSAVPPIADEPWFTKTRVRYRLTAISVDHSACPYQNYTV
IFVGSEAGMVLKVLAKTSPFSLNDSVLLEEIEAYNHAK

| | | |
|---|---|---|
| | SEQ ID NO: 223 | 1894 bp |
| NOV16o, SNP13378935 of | ORF Start: ATG at 46 | ORF Stop: TAG at 1474 |
| CG59253-01, DNA Sequence | SNP Pos: 965 | SNP Change: A to G |

TGGCATTTCTGAGCAGGGGCCACCCTGACTTCACCTTGGCCCACCATGAGGGTCTTCCTGCTTTGTGCCTACA
TACTGCTGCTGATGGTTTCCCAGTTGAGGGCAGTCAGCTTTCCTGAAGATGATGAACCCCTTAATACTGTCGA
CTATCACTATTCAAGGCAATATCCGGTTTTTAGAGGACGCCCTTCAGGCAATGAATCGCAGCACAGGCTGGAC
TTTCAGCTGATGTTGAAAATTCGAGACACACTTTATATTGCTGGCAGGGATCAAGTTTATACAGTAAACTTAA
ATGAAATGCCCAAAACAGAAGTAATACCCAACAAGAAACTGACATGGCGATCAAGACAACAGGATCGAGAAAA
CTGTGCTATGAAAGGCAAGCATAAAGATGAATGCCACAACTTTATCAAAGTATTTGTTCCAAGAAACGATGAG
ATGGTTTTTGTTTGTGGTACCAATGCATTCAATCCCATGTGTAGATACTACAGGTTGAGTACCTTAGAATATG
ATGGGGAAGAAATTAGTGGCCTGGCAAGATGCCCATTTGATGCCAGACAAACCAATGTTGCCCTCTTTGCTGA
TGGGAAGCTGTATTCTGCCACAGTGGCTGACTTCTTGGCCAGCGATGCCGTTATTTATCGAAGCATGGGTGAT
GGATCTGCCCTTCGCACAATAAAATATGATTCCAAATGGATAAAAGAGCCACACTTTCTTCATGCCATAGAAT
ATGGAAACTATGTCTATTTCTTCTTTCGAGAAATCGCTGTCGAACATAATAATTTAGGCAAGGCTGTGTATTC
CCGCGTGGCCCGCATATGTAAAAACGACATGGGTGGTTCCCAGCGGGTCCTGGAGAAACACTGGACTTCATTT
CTAAAGGCTCGGCTGAACTGTTCTGTCCCTGGAGATTCGTTTTTCTACTTTGATGTTCTGCAGTCTATTACAG
ACATAATACAAATCAGTGGCATCCCCACTGTGGTCGGGGTGTTTACCACGCAGCTCAATAGCATCCCTGGTTC
TGCTGTCTGTGCATTTAGCATGGATGACATTGAAAAAGTATTCAAAGGACGGTTTAAGGAACACAAAACTCCA
GATTCTGTTTGGACAGCAGTTCCCGAAGACAAAGTGCCAAAGCCAAGGCCTGGCTGTTGTGCAAAACACGGCC
TTGCCGAAGCTTATAAAACCTCCATCGATTTCCCGGATGAAACTCTGTCATTCATCAAATCTCATCCCCTGAT
GGACTCTGCCGTTCCACCCATTGCCGATGAGCCCTGGTTCACAAAGACTCGGGTCAGGTACAGACTGACGGCC
ATCTCAGTGGACCATTCAGCCGGACCCTACCAGAACTACACAGTCATCTTTGTTGGCTCTGAAGCTGGCATGG
TACTTAAAGTTCTGGCAAAGACCAGTCCTTTCTCTTTGAACGACAGCGTATTACTGGAAGAGATTGAAGCCTA
CAACCATGCAAAGTAGGTATATGTTACGAGAACGCCCTTCAGCACTGCTCAAAAATTTTCGGCATGTATTTCA
TCTACTCATGTCCTTTTGGTCCTCTAAATTAGCAGTGGTTTGGCATAATAGTGTTTTGTGTTTTTTTTCTCAT
TGAAATAAATCTTGGGTTTGTTTTTTTCCCGAGCCTGCTAGGGCGAGGGGGGTGAATGGTTGATGAGTTTAAA
AATAATGCAGCCCTTGTTTTTCACCTGTAGAATATGAGAACATTTTAACAGCACCTCTCTTATCTTGCAGATA
TATTCCAAGATGCTACATGCAGCAGACAGCTGTGAGCTTGCATACACACACACACAAATATACATGCACATAC
ATACACAGAATGTAGTACTAGTTAAGTATTTCCTTCCTATCTTTAATAAGTAAGAGAATATTTAGACCA

| | | | |
|---|---|---|---|
| NOV16o, SNP13378935 of | SEQ ID NO: 224 | | MW at 54189.4kD |
| CG59253-01, Protein Sequence | SNP Pos: 307 | 476 aa | SNP Change: Asn to Ser |

MRVFLLCAYILLLMVSQLRAVSFPEDDEPLNTVDYHYSRQYPVFRGRPSGNESQHRLDFQLMLKIRDTLYIAG
RDQVYTVNLNEMPKTEVIPNKKLTWRSRQQDRENCAMKGKHKDECHNFIKVFVPRNDEMVFVCGTNAFNPMCR
YYRLSTLEYDGEEISGLARCPFDARQTNVALFADGKLYSATVADFLASDAVIYRSMGDGSALRTIKYDSKWIK
EPHFLHAIEYGNYVYFFFREIAVEHNNLGKAVYSRVARICKNDMGGSQRVLEKHWTSFLKARLINCSVPGDSFF
YFDVLQSITDIIQISGIPTVVGVFTTQLNSIPGSAVCAFSMDDIEKVFKGRFKEQKTPDSVWTAVPEDKVPKP
RPGCCAKHGLAEAYKTSIDFPDETLSFIKSHPLMDSAVPPIADEPWFTKTRVRYRLTAISVDHSAGPYQNYTV
IFVGSEAGMVLKVLAKTSPFSLNDSVLLEEIEAYNHAK

| | | |
|---|---|---|
| | SEQ ID NO: 225 | 1894 bp |
| NOV16p, SNP13381569 of | ORF Start: ATG at 46 | ORF Stop: TAG at 1474 |
| CG59253-01, DNA Sequence | SNP Pos: 1351 | SNP Change: T to C |

TGGCATTTCTGAGCAGGGGCCACCCTGACTTCACCTTGGCCCACCATGAGGGTCTTCCTGCTTTGTGCCTACA
TACTGCTGCTGATGGTTTCCCAGTTGAGGGCAGTCAGCTTTCCTGAAGATGATGAACCCCTTAATACTGTCGA
CTATCACTATTCAAGGCAATATCCGGTTTTTAGAGGACGCCCTTCAGGCAATGAATCGCAGCACAGGCTGGAC
TTTCAGCTGATGTTGAAAATTCGAGACACACTTTATATTGCTGGCAGGGATCAAGTTTATACAGTAAACTTAA
ATGAAATGCCCAAAACAGAAGTAATACCCAACAAGAAACTGACATGGCGATCAAGACAACAGGATCGAGAAAA
CTGTGCTATGAAAGGCAAGCATAAAGATGAATGCCACAACTTTATCAAAGTATTTGTTCCAAGAAACGATGAG
ATGGTTTTTGTTTGTGGTACCAATGCATTCAATCCCATGTGTAGATACTACAGGTTGAGTACCTTAGAATATG
ATGGGGAAGAAATTAGTGGCCTGGCAAGATGCCCATTTGATGCCAGACAAACCAATGTTGCCCTCTTTGCTGA
TGGGAAGCTGTATTCTGCCACAGTGGCTGACTTCTTGGCCAGCGATGCCGTTATTTATCGAAGCATGGGTGAT
GGATCTGCCCTTCGCACAATAAAATATGATTCCAAATGGATAAAAGAGCCACACTTTCTTCATGCCATAGAAT
ATGGAAACTATGTCTATTTCTTCTTCGAGAAATCGCTGTCGAACATAATAATTTAGGCAAGGCTGTGTATTC
CCGCGTGGCCCGCATATGTAAAAACGACATGGGTGGTTCCCAGCGCGTCCTGGAGAAACACTGGACTTCATTT
CTAAAGGCTCGGCTGAACTGTTCTGTCCCTGGAGATTCGTTTTTCTACTTTGATGTTCTGCAGTCTATTACAG
ACATAATACAAATCAATGGCATCCCCACTGTGGTCGGCGTGTTTACCACGCAGCTCAATAGCATCCCTGGTTC
TGCTGTCTGTGCATTTAGCATGGATGACATTGAAAAAGTATTCAAAGGACGGTTTAAGGAACAGAAAACTCCA
GATTCTGTTTGGACAGCAGTTCCCGAAGACAAAGTGCCAAAGCCAAGGCCTGGCTGTTGTGCAAAACACGGCC
TTGCCGAAGCTTATAAAACCTCCATCGATTTCCCGGATGAAACTCTGTCATTCATCAAATCTCATCCCCTGAT
GGACTCTGCCGTTCCACCCATTGCCGATGAGCCCTGGTTCACAAAGACTCGGGTCAGGTACAGACTGACGGCC
ATCTCAGTGGACCATTCAGCCGGACCCTACCAGAACCACACAGTCATCTTTGTTGGCTCTGAAGCTGGCATGG
TACTTAAAGTTCTGGCAAAGACCAGTCCTTTCTCTTTGAACGACAGCGTATTACTGGAAGAGATTGAAGCCTA
CAACCATGCAAAGTAGGTATATGTTACGAGAACGCCCTTCAGCACTGCTCAAAAATTTTCGGCATGTATTTCA
TCTAGTCATGTCCTTTTGGTCCTCTAAATTAGCAGTGGTTTGGCATAATAGTGTTTTGTGTTTTTTTTCTCAT
TGAAATAAATCTTGGGTTTGTTTTTTTCCCGAGCCTGCTAGGGCGAGGGGGGTGAATGGTTGATGAGTTTAAA
AATAATGCAGCCCTTGTTTTTCACCTGTAGAATATGAGAACATTTTAACAGCACCTCTCTTATCTTGCAGATA
TATTCCAAGATGCTACATGCAGCAGACAGCTGTGAGCTTGCATACACACACACACAAATATACATGCACATAC
ATACACAGAATGTAGTACTAGTTAAGTATTTCCTTCCTATCTTTAATAAGTAAGAGAATATTTAGACCA

| | | | |
|---|---|---|---|
| NOV16p, SNP13381569 of | SEQ ID NO: 226 | | MW at 54190.4kD |
| CG59253-01, Protein Sequence | SNP Pos: 436 | 476 aa | SNP Change: Tyr to His |

MRVFLLCAYILLLMVSQLRAVSFPEDDEPLNTVDYHYSRQYPVFRGRPSGNESQHRLDFQLMLKIRDTLYIAG
RDQVYTVNLNEMPKTEVIPNKKLTWRSRQQDRENCAMKGKHKDECHNFIKVFVPRNDEMVFVCGTNAFNPMCR
YYRLSTLEYDGEEISGLARCPFDARQTNVALFADGKLYSATVADFLASDAVIYRSMGDGSALRTIKYDSKWIK
EPHFLHAIEYGNYVYFFFREIAVEHNNLGKAVYSRVARICKNDMGGSQRVLEKHWTSFLKARLNCSVPGDSFF
YFDVLQSITDIIQINGIPTVVGVFTTQLNSIPGSAVCAFSMDDIEKVFKGRFKEQKTPDSVWTAVPEDKVPKP
RPGCCAKHGLAEAYKTSIDFPDETLSFIKSHPLMDSAVPPIADEPWFTKTRVRYRLTAISVDHSAGPYQNHTV
IFVGSEAGMVLKVLAKTSPFSLNDSVLLEEIEAYNHAK

| | | |
|---|---|---|
| | SEQ ID NO: 227 | 1894 bp |
| NOV16q, SNP13382528 of | ORF Start: ATG at 46 | ORF Stop: TAG at 1474 |
| CG59253-01, DNA Sequence | SNP Pos: 1838 ISNP Change: T to C | |

TGGCATTTCTGAGCAGGGGCCACCCTGACTTCACCTTGGCCCACCATGAGGGTCTTCCTGCTTTGTGCCTACA
TACTGCTGCTGATGGTTTCCCAGTTGAGGGCAGTCAGCTTTCCTGAAGATGATGAACCCCTTAATACTGTCGA
CTATCACTATTCAAGGCAATATCCGGTTTTTAGAGGACGCCCTTCAGGCAATGAATCGCAGCACAGGCTGGAC
TTTCAGCTGATGTTGAAAATTCGAGACACACTTTATATTGCTGGCAGGGATCAAGTTTATACAGTAAACTTAA
ATGAAATGCCCAAAACAGAAGTAATACCCAACAAGAAACTGACATGGCGATCAAGACAACAGGATCGAGAAAA
CTGTGCTATGAAAGGCAAGCATAAAGATGAATGCCACAACTTTATCAAAGTATTTGTTCCAAGAAACGATGAG
ATGGTTTTTGTTTGTGGTACCAATGCATTCAATCCCATGTGTAGATACTACAGGTTGAGTACCTTAGAATATG
ATGGGGAAGAAATTAGTGGCCTGGCAAGATGCCCATTTGATGCCAGACAAACCAATGTTGCCCTCTTTGCTGA
TGGGAAGCTGTATTCTGCCACAGTGGCTGACTTCTTGGCCAGCGATGCCGTTATTTATCGAAGCATGGGTGAT
GGATCTGCCCTTCGCACAATAAAATATGATTCCAAATGGATAAAAGAGCCACACTTTCTTCATGCCATAGAAT
ATGGAAACTATGTCTATTTCTTCTTTCGAGAAATCGCTGTCGAACATAATAATTTAGGCAAGGCTGTGTATTC
CCGCGTGGCCCGCATATGTAAAAACGACATGGGTGGTTCCCAGCGGGTCCTGGAGAAACACTGGACTTCATTT
CTAAAGGCTCGGCTGAACTGTTCTGTCCCTGGAGATTCGTTTTTCTACTTTGATGTTCTGCAGTCTATTACAG
ACATAATACAAATCAATGGCATCCCCACTGTGGTCGGGGTGTTTACCACGCAGCTCAATAGCATCCCTGGTTC
TGCTGTCTGTGCATTTAGCATGGATGACATTGAAAAAGTATTCAAAGGACGGTTTAAGGAACAGAAAACTCCA
GATTCTGTTTGGACAGCAGTTCCCGAAGACAAAGTGCCAAAGCCAAGGCCTGGCTGTTGTGCAAAACACGGCC
TTGCCGAAGCTTATAAAACCTCCATCGATTTCCCGGATGAAACTCTGTCATTCATCAAATCTCATCCCCTGAT
GGACTCTGCCGTTCCACCCATTGCCGATGAGCCCTGGTTCACAAAGACTCGGGTCAGGTACAGACTGACGGCC
ATCTCAGTGGACCATTCAGCCGGACCCTACCAGAACTACACAGTCATCTTTGTTGGCTCTGAAGCTGGCATGG
TACTTAAAGTTCTGGCAAAGACCAGTCCTTTCTCTTTGAACGACAGCGTATTACTGGAAGAGATTGAAGCCTA
CAACCATGCAAAGTAGGTATATGTTACGAGAACGCCCTTCAGCACTGCTCAAAAATTTTCGGCATGTATTTCA
TCTAGTCATGTCCTTTTGGTCCTCTAAATTAGCAGTGGTTTGGCATAATAGTGTTTTGTGTTTTTTTTCTCAT
TGAAATAAATCTTGGGTTTGTTTTTTTCCCGAGCCTGCTAGGGCGAGGGGGGTGAATGGTTGATGAGTTTAAA
AATAATGCAGCCCTTGTTTTTCACCTGTAGAATATGAGAACATTTTAACAGCACCTCTCTTATCTTGCAGATA
TATTCCAAGATGCTACATGCAGCAGACAGCTGTGAGCTTGCATACACACACACACAAATATACATGCACATAC
ATACACAGAATGCAGTACTAGTTAAGTATTTCCTTCCTATCTTTAATAAGTAAGAGAATATTTAGACCA

| | | | |
|---|---|---|---|
| NOV16q, SNP13382528 of | | | MW at 54216.4kD |
| CG59253-01, Protein Sequence | SEQ ID NO: 228 | 476 aa | SNP Change: no change |

MRVFLLCAYILLLMVSQLRAVSFPEDDEPLNTVDYHYSRQYPVFRGRPSGNESQHRLDFQLMLKIRDTLYIAG
RDQVYTVNLNEMPKTEVIPNKKLTWRSRQQDRENCAMKGKHKDECHNFIKVFVPRNDEMVFVCGTNAFNPMCR
YYRLSTLEYDGEEISGLARCPFDARQTNVALFADGKLYSATVADFLASDAVIYRSMGDGSALRTIKYDSKWIK
EPHFLHAIEYGNYVYFFFREIAVEHNNLGKAVYSRVARICKNDMGGSQRVLEKHWTSFLKARLNCSVPGDSFF
YFDVLQSITDIIQINGIPTVVGVFTTQLNSIPGSAVCAFSMDDIEKVFKGRFKEQKTPDSVWTAVPEDKVPKP
RPGCCAKHGLAEAYKTSIDFPDETLSFIKSHPLMDSAVPPIADEPWFTKTRVRYRLTAISVDHSAGPYQNYTV
IFVGSEAGMVLKVLAKTSPFSLNDSVLLEEIEAYNHAK

[0447] A ClustalW comparison of the above protein sequences yields the following sequence alignment shown in Table 16B.

TABLE 16B
Comparison of the NOV16 protein sequences.

| | |
|---|---|
| NOV16a | MRVFLLCAYILLLMVSQLRAVSFPEDDEPLNTVDYHY--SRQYPVFRGRPSGNESQHRLD |
| NOV16b | ------------------GSVSFPEDDEPLNTVDYHY--SRQYPVFRGRPSGNESQHRLD |
| NOV16c | MRVFLLCAYILLLMVSQLRAVSFPEDDEPLNTVDYHCKSSRQYPVFRGRPSGNESQHRLD |
| NOV16d | ------------------GSVSFPEDDEPLNTVDYHY--SRQYPVFRGRPSGNESQHRLD |
| NOV16e | --------------------VSFPEDDEPLNTVDYHY--SRQYPVFRGRPSGNESQHRLD |
| NOV16f | --------------------VSFPEDDEPLNTVDYHY--SRQYPVFRGRPSGNESQHRLD |
| NOV16g | MRVFLLCAYILLLMVSQLRAVSFPEDDEPLNTVDYHCKSSRQYPVFRGRPSGNESQHRLD |
| NOV16h | MRVFLLCAYILLLMVSQLRAVSFPEDDEPLNTVDYHCKSSRQYPVFRGRPSGNESQHRLD |
| NOV16i | MRVFLLCAYILLLMVSQLRAVSFPEDDEPLNTVDYHCKSSRQYPVFRGRPSGNESQHRLD |
| NOV16j | MRVFLLCAYILLLMVSQLRAVSFPEDDEPLNTVDYHCKSSRQYPVFRGRPSGNESQHRLD |
| NOV16k | MRVFLLCAYILLLMVSQLRAVSFPEDDEPLNTVDYHY--SRQYPVFRGRPSGNESQHRLD |
| NOV16l | --------------------VSFPEDDEPLNTVDYHY--SRQYPVFRGRPSGNESQHRLD |
| NOV16a | FQLMLKIRDTLYIAGRDQVYTVNLNEMPKTEVIPNKKLTWRSRQQDRENCAMKGKHKDEC |
| NOV16b | FQLMLKIRDTLYIAGRDQVYTVNLNEMPKTEVIPNKKLTWRSRQQDRENCAMKGKHKDEC |
| NOV16c | FQLMLKIRDTLYIAGRDQVYTVNLNEMPKTEVIWQQKLTWRSRQQDRENCAMKGKHKDEC |
| NOV16d | FQLMLKIRDTLYIAGGDQVYTVNLNEMPKTEVIPNKKLTWRSRQQDRENCAMKGKHKDEC |
| NOV16e | FQLMLKIRDTLYIAGRDQVYTVNLNEMPKTEVIPNKKLTWRSRQQDRENCAMKGKHKDEC |
| NOV16f | FQLMLKIRDTLYIAGGDQVYTVNLNEMPKTEVIPNKKLTWRSRQQDRENCAMKGKHKDEC |
| NOV16g | FQLMLKIRDTLYIAGRDQVYTVNLNEMPKTEVIWQQKLTWRSRQQDRENCAMKGKHKDEC |
| NOV16h | FQLMLKIRDTLYIAGRDQVYTVNLNEMPKTEVIWQQKLTWRSRQQDRENCAMKGKHKDEC |
| NOV16i | FQLMLKIRDTLYIAGRDQVYTVNLNEMPKTEVIWQQKLTWRSRQQDRENCAMKGKHKDEC |
| NOV16j | FQLMLKIRDTLYIAGRDQVYTVNLNEMPKTEVIWQQKLTWRSRQQDRENCAMKGKHKDEC |
| NOV16k | FQLMLKIRDTLYIAGRDQVYTVNLNEMPKTEVIPNKKLTWRSRQQDRENCAMKGKHKDEC |
| NOV16l | FQLMLKIRDTLYIAGRDQVYTVNLNEMPKTEVIPNKKLTWRSRQQDRENCAMKGKHKDEC |
| NOV16a | HNFIKVFVPRNDEMVFVCGTNAFNPMCRYYRLSTLEYDGEEISGLARCPFDARQTNVALF |
| NOV16b | HNFIKVFVPRNDEMVFVCGTNAFNPMCRYYRLSTLEYDGEEISGLARCPFDARQTNVALF |
| NOV16c | HNFIKVFVPRNDEMVFVCGTNAFNPMCRYYRVSTLEYDGEEISGLARCPFDARQTNVALF |
| NOV16d | HNFIKVFVPRNDEMVFVCGTNAFNPMCRYYRLSTLEYDGEEISGLARCPFDARQTNVALF |
| NOV16e | HNFIKVFVPRNDEMVFVCGTNAFNPMCRYYRLSTLEYDGEEISGLARCPFDARQTNVALF |
| NOV16f | HNFIKVFVPRNDEMVFVCGTNAFNPMCRYYRLSTLEYDGEEISGLARCPFDARQTNVALF |
| NOV16g | HNFIKVFVPRNDEMVFVCGTNAFNPMCRYYRVSTLEYDGEEISGLARCPFDARQTNVALF |
| NOV16h | HNFIKVFVPRNDEMVFVCGTNAFNPMCRYYRVSTLEYDGEEISGLARCPFDARQTNVALF |
| NOV16i | HNFIKVFVPRNDEMVFVCGTNAFNPMCRYYRVSTLEYDGEEISGLARCPFDARQTNVALF |
| NOV16j | HNFIKVFVPRNDEMVFVCGTNAFNPMCRYYRVSTLEYDGEEISGLARCPFDARQTNVALF |
| NOV16k | HNFIKVFVPRNDEMVFVCGTNAFNPMCRYYRLSTLEYDGEEISGLARCPFDARQTNVALF |
| NOV16l | HNFIKVFVPRNDEMVFVCGTNAFNPMCRYYRLSTLEYDGEEISGLARCPFDARQTNVALF |
| NOV16a | ADGKLYSATVADFLASDAVIYRSMGDGSALRTIKYDSKWIKEPHFLHAIEYGNYVYFFFR |
| NOV16b | ADGKLYSATVADFLASDAVIYRSMGDGSALRTIKYDSKWIKEPHFLHAIEYGNYVYFFFR |
| NOV16c | ADGKLYSATVADFLASDAVIYRSMGDGSALRTIKYDSKWIKEPHFLHAIEYGNYVYFFFR |
| NOV16d | ADGKLYSATVADFLASDAVIYRSMGDGSALRTIKYDSKWIKEPHFLHAIEYGNYVYFFFR |
| NOV16e | ADGKLYSATVADFLASDAVIYRSMGDGSALRTIKYDSKWIKEPHFLHAIEYGNYVYFFFR |
| NOV16f | ADGKLYSATVADFLASDAVIYRSMGDGSALRTIKYDSKWIKEPHFLHAIEYGNYVYFFFR |
| NOV16g | ADGKLYSATVADFLASDAVIYRSMGDGSALRTIKYDSKWIKEPHFLHAIEYGNYVYFFFR |
| NOV16h | ADGKLYSATVADFLASDAVIYRSMGDGSALRTIKYDSKWIKEPHFLHAIEYGNYVYFFFR |
| NOV16i | ADGKLYSATVADFLASDAVIYRSMGDGSALRTIKYDSKWIKEPHFLHAIEYGNYVYFFFR |
| NOV16j | ADGKLYSATVADFLASDAVIYRSMGDGSALRTIKYDSKWIKEPHFLHAIEYGNYVYPFFR |
| NOV16k | ADGKLYSATVADFLASDAVIYRSMGDGSALRTIKYDSKWIKEPHFLHAIEYGNYVYFFFR |
| NOV16l | ADGKLYSATVADFLASDAVIYRSMGDGSALRTIKYDSKWIKEPHFLHAIEYGNYVYFFFR |
| NOV16a | EIAVEHNNLGKAVYSRVARICKNDMGGSQRVLEKHWTSFLKARLNCSVPGDSFFYFDVLQ |
| NOV16b | EIAVEHNNLGKAVYSRVARICKNDMGGSQRVLEKHWTSFLKARLNCSVPGDSFFYFDVLQ |
| NOV16c | EIAVEHNNLGKAVYSRVARICKNDMGGSQRVLEKHWTSFLKARLNCSVPGDSFFYFDVLQ |
| NOV16d | EIAVEHNNLGKAVYSRVARICKNDMGGSQRVLEKHWTSFLKARLNCSVPGDSFFYFDVLQ |
| NOV16e | EIAVEHNNLGKAVYSRVARICKNDMGGSQRVLEKHWTSFLKARLNCSVPGDSFFYFDVLQ |
| NOV16f | EIAVEHNNLGKAVYSRVARICKNDMGGSQRVLEKHWTSFLKARLNCSVPGDSFFYFDVLQ |
| NOV16g | EIAVEHNNLGKAVYSRVARICKNDMGGSQRVLEKHWTSFLKARLNCSVPGDSFFYFDVLQ |
| NOV16h | EIAVEHNNLGKAVYSRVARICKNDMGGSQRVLEKHWTSFLKARLNCSVPGDSFFYFDVLQ |
| NOV16i | EIAVEHNNLGKAVYSRVARICKNDMGGSQRVLEKHWTSFLKARLNCSVPCDSFFYFDVLQ |
| NOV16j | EIAVEHNNLGKAVYSRVARICKNDMGGSQRVLEKHWTSFLKARLNCSVPGDSFFYFDVLQ |
| NOV16k | EIAVEHNNLGKAVYSRVARICKNDMGGSQRVLEKHWTSFLKARLNCSVPGDSFFYFDVLQ |
| NOV16l | EIAVEHNNLGKAVYSRVARICKNDMGGSQRVLEKHWTSFLKARLNCSVPGDSFFYFDVLQ |
| NOV16a | SITDIIQINGIPTVVGVFTTQLNSIPGSAVCAFSMDDIEKVFKGRFKEQKTPDSVWTAVP |
| NOV16b | SITDIIQINGIPTVVGVFTTQLNSIPGSAVCAFSMDDIEKVFKGRFKEQKTPDSVWTAVP |
| NOV16c | SITDIIQINGIPTVVGVFTTQLNSIPGSAVCAFSMDDIEKVFKGRFKEQKTPDSVWTAVP |
| NOV16d | SITDIIQINGIPTVVGVFTTQLNSIPGSAVCAFSMDDIEKVFKGRFKEQKTPDSVWTAVP |
| NOV16e | SITDIIQINGIPTVVGVFTTQLNSIPGSAVCAFSMDDIEKVFKGRFKEQKTPDSVWTAVP |
| NOV16f | SITDIIQINGIPTVVGVFTTQLNSIPGSAVCAFSMDDIEKVFKGRFKEQKTPDSVWTAVP |
| NOV16g | SITDIIQINGIPTVVGVFTTQLNSIPGSAVCAFSMDDIEKVFKGRFKEQKTPDSVWTAVP |
| NOV16h | SITDIIQINGIPTVVGVFTTQLNSIPGSAVCAFSMDDIEKVFKGRFKEQKTPDSVWTAVP |
| NOV16i | SITDIIQINGIPTVVGVFTTQLNSIPGSAVCAFSMDDIEKVFKGRFKEQKTPDSVWTAVP |
| NOV16j | SITDIIQINGIPTVVGVFTTQLNSIPGSAVCAFSMDDIEKVFKGRFKEQKTPDSVWTAVP |
| NOV16k | SITDIIQINGIPTVVGVFTTQLNSIPGSAVCAFSMDDIEKVFKGRFKEQKTPDSVWTAVP |
| NOV16l | SITDIIQINGIPTVVGVFTTQLNSIPGSAVCAFSMDDIEKVFKGRFKEQKTPDSVWTAVP |
| NOV16a | EDKVPKPRPGCCAKHGLAEAYKTSIDFPDETLSFIKSNPLMDSAVPPIADEPWFTKTRVR |
| NOV16b | EDKVPKPRPGCCAKHGLAEAYKTSIDFPDETLSFIKSHPLMDSAVPPIADEPWFTKTRVR |
| NOV16c | EDKVPKPRPGCCAKHGLAEAYKTSIDFPDETLSFIKSHPLMDSAVPPIADEPWFTKTRVR |
| NOV16d | EDKVPKPRPGCCAKHGLAEAYKTSIDFPDETLSFIKSHPLMDSAVPPIADEPWFTKTRVR |
| NOV16e | EDKVPKPRPGCCAKHGLAEAYKTSIDFPDETLSFIKSHPLMDSAVPPIADEPWFTKTRVR |
| NOV16f | EDKVPKPRPGCCAKHGLAEAYKTSIDFPDETLSFIKSHPLMDSAVPPIADEPWFTKTRVR |
| NOV16g | EDKVPKPRPGCCAKHGLAEAYKTSIDFPDETLSFIKSHPLMDSAVPPIADEPWFTKTRVR |
| NOV16h | EDKVPKPRPGCCAKHGLAEAYKTSIDFPDETLSFIKSHPLMDSAVPPIADEPWFTKTRVR |
| NOV16i | EDKVPKPRPGCCAKHGLAEAYKTSIDFPDETLSFIKSHPLMDSAVPPIADEPWFTKTRVR |
| NOV16j | EDKVPKPRPGCCAKHGLAEAYKTSIDFPDETLSFIKSHPLMDSAVPPIADEPWFTKTRVR |
| NOV16k | EDKVPKPRPGCCAKHGLAEAYKTSIDFPDETLSFIKSHPLMDSAVPPIADEPWFTKTRVR |
| NOV16l | EDKVPKPRPGCCAKHGLAEAYKTSIDFPDETLSFIKSHPLMDSAVPPIADEPWFTKTRVR |
| NOV16a | YRLTAISVDHSAGPYQNYTVIFVGSEAGMVLKVLAKTSPFSLNDSVLLEEIEAYNHAK-- |
| NOV16b | YRLTAISVDHSAGPYQNYTVIFVGSEAGMVLKVLAKTSPFSLNDSVLLEEIEAYNHAKCL |
| NOV16c | YRLTAISVDHSAGPYQNYTVIFVGSEAGMVLKVLAKTSPFSLNDSVLLEEIEAYNHAKCS |
| NOV16d | YRLTAISVDHSAGPYQNYTVIFVGSEAGMVLKVLAKTSPFSLNDSVLLEEIEAYNHAKCN |
| NOV16e | YRLTAISVDHSAGPYQNYTVIFVGSEAGMVLKVLAKTSPFSLNDSVLLEEIEAYNHAK-- |
| NOV16f | YRLTAISVDHSAGPYQNYTVIFVGSEAGMVLKVLAKTSPFSLNDSVLLEEIEAYNHAKCN |
| NOV16g | YRLTAISVDHSAGPYQNYTVIFVGSEAGMVLKVLAKTSPFSLNDSVLLEEIEAYNHAKCS |
| NOV16h | YRLTAISVDHSAGPYQNYTVIFVGSEAGMVLKVLAKTSPFSLNDSVLLEEIEAYNHAKCS |
| NOV16i | YRLTAISVDHSAGPYQNYTVIFVGSEAGMVLKVLAKTSPFSLNDSVLLEEIEAYNHAKCS |
| NOV16j | YRLTAISVDHSAGPYQNYTVIFVGSEAGMVLKVLAKTSPFSLNDSVLLEEIEAYNHAKCS |
| NOV16k | YRLTAISVDHSAGPYQNYTVIFVGSEAGMVLKVLAKTSPFSLNDSVLLEEIEAYNHAKCS |
| NOV16l | YRLTAISVDHSAGPYQNYTVIFVGSEAGMVLKVLAKTSPFSLNDSVLLEEIEAYNHAKCS |
| NOV16a | ------------------------------------------------------------ |
| NOV16b | E----------------------------------------------------------- |
| NOV16c | AENEEDKKVISLQLDKDHHALYVAFSSCIIRIPLSRCERYGSCKKSCIASRDPYCGWLSQ |
| NOV16d | AENEEDKKVISLQLDKDHHALYVAFSSCIIRIPLSRCERYGSCKKSCIASRDPYCGWLSQ |
| NOV16e | ------------------------------------------------------------ |
| NOV16f | AENEEDKKVISLQLDKDHHALYVAFSSCIIRIPLSRCERYGSCKKSCIASRDPYCGWLSQ |
| NOV16g | AENEEDKKVISLQLDKDHHALYVAFSSCIIRIPLSRCERYGSCKKSCIASRDPYCGWLSQ |
| NOV16h | AENEEDKKVISLQLDKDHHALYVAFSSCIIRIPLSRCERYGSCKKSCIASRDPYCGWLSQ |
| NOV16i | AENEEDKKVISLQLDKDHHALYVAFSSCIIRIPLSRCERYGSCKKSCIASRDPYCGWLSQ |
| NOV16j | AENEEDKKVISLQLDKDHHALYVAFSSCIIRIPLSRCERYGSCKKSCIASRDPYCGWLSQ |
| NOV16k | AENEEDKKVISLQLDKDHHALYVAFSSCIIRIPLSRCERYGSCKKSCIASRDPYCGWLSQ |
| NOV16l | AENEEDKKVISLQLDKDHHALYVAFSSCIIRIPLSRCERYGSCKKSCIASRDPYCGWLSQ |
| NOV16a | ------------------------------------------------------------ |
| NOV16b | ------------------------------------------------------------ |
| NOV16c | GSCGRVTP-------------NHSAEGYEQDTEFGNTAHLGDCHAYEPYEGR-------- |
| NOV16d | GSCGRVTP-------------GMLAEGYEQDTEFGNTAHLGD------------------ |
| NOV16e | ------------------------------------------------------------ |
| NOV16f | GSCGRVTP-------------GMLAEGYEQDTEFGNTAHLGD------------------ |
| NOV16g | GSCGRVTPGMLLLTEDFFAFHNHSAEGYEQDTEFGNTAHLCDCHEILPTS---------- |
| NOV16h | GSCGRVTPGMLLLTEDFFAFHNHSAEGYEQDTEFGNTAHLGDCHEILPTS---------- |
| NOV16i | GSCGRVTPGMLLLTEDFFAFHNHSAEGYEQDTEFGNTAHLGDCHEILPTS---------- |
| NOV16j | GSCGRVTPGMLLLTEDFFAFHNHSAEGYEQDTEFGNTAHLGDCHEILPTS---------- |
| NOV16k | GSCGRVTP-------------GMLAEGYEQDTEFGNTAHLGDCHEILPTSTTPDYKIFGG |
| NOV16l | GSCGRVTPGMLLLTEDFFAFHNHSAEGYEQDTEFGNTAHLGDCHEILPTS--------- |
| NOV16a | ------------------------------------------------------------ |
| NOV16b | ------------------------------------------------------------ |
| NOV16c | --------------------------------VGSLKAICYLLLFLKSTLFTLSHVSISG |
| NOV16d | ---------------------------------------------------------CHG |
| NOV16e | ------------------------------------------------------------ |
| NOV16f | ---------------------------------------------------------CHG |
| NOV16g | ----------------------------------------------TTPDYKIFGGPTSG |
| NOV16h | ----------------------------------------------TTPDYKIFGGPTSG |
| NOV16i | ---------------------------------------------------------TTP |
| NOV16j | ---------------------------------------------------------TTP |
| NOV16k | PTSDMEVSSSSVTTMASIPEITPKVIDTWRPKLTSSRKFVVQDDPNTSDFTDPLSGIPKG |
| NOV16l | -----------------------------------------------TTP---------- |
| NOV16a | ------------------------------------------------------------ |
| NOV16b | ------------------------------------------------------------ |
| NOV16c | VRWEVQSGESNQMVHMNVLITCVFAAFVLGAFIAGVAVYCYRDMFVRKNRKIHKDAESAQ |
| NOV16d | VRWEVQSGESNQMVHMNLE----------------------------------------- |
| NOV16e | ------------------------------------------------------------ |
| NOV16f | VRWEVQSGESNQMVHMN------------------------------------------- |
| NOV16g | VRWEVQSGESNQMVHMNVLITCVFAAFVLGAFIAGVAVYCYRDMFVRKNRKIHKDAESAQ |
| NOV16h | VRWEVQSGESNQMVHMNVLITCVFAAFVLGAFIAGVAVYCYRDMFVRKNRKIHKDAESAQ |
| NOV16i | -DYKIFGGPTSDMEVSSSSVTTMAS----IPEITPKVIDTWRPKLTSSRKFVVQDDPNTS |
| NOV16j | -DYKIFGGPTSDMEVSSSSVTTMAS----IPEITPKVIDTWRPKLTSSRKFVVQDDPNTS |
| NOV16k | VRWEVQSGESNQMVHMNVLITCVFAAFVLGAFIAGVAVYCYRDMFVRKNRKIHKDAESAQ |
| NOV16l | -DYKIFGGPTSDMEVSSSSVTTNAS----IPEITPKVIDTWRPKLTSSRKFVVQDDPNTS |
| NOV16a | ------------------------------------------------------------ |
| NOV16b | ------------------------------------------------------------ |
| NOV16c | SCTDSSGSFAKLNGLFDSPVKEYQQNIDSPKLYSNLLTSRKELPPNGDTKSMVMDHRGQP |
| NOV16d | ------------------------------------------------------------ |
| NOV16e | ------------------------------------------------------------ |
| NOV16f | ------------------------------------------------------------ |
| NOV16g | SCTDSSGSFAKLNGLFDSPVKEYQQNIDSPKLYSNLLTSRKEHEFSGR------------ |
| NOV16h | SCTDSSGSFAKLNGLFDSPVKEYQQNIDSPKLYSNLLTSRKELPPNGDSKSMVMDHRGQP |
| NOV16i | DFTDP------LSGIPKGVRWEVQSGESNQMVHMNVLITCVFAAFVLGAFIAGVAVYCYR |
| NOV16j | DFTDP------LSGIPKGVRWEVQSGESNQMVHMNVLITCVFAAFVLGAFIAGVAVYCYR |
| NOV16k | SCTDSSGSFAKLNGLFDSPVKEYQQNIDSPKLYSNLLTSRKELPPNGDTKSMVMDHRGQP |
| NOV16l | DFTDP------LSGIPKGVRWEVQ------------------------------------ |
| NOV16a | ------------------------------------------------------------ |
| NOV16b | ------------------------------------------------------------ |
| NOV16c | PELAALPTPESTPVLHQKTLQAMKSHSEKAHGHGASRKETPQFFPSSPPPHSPLSHGHIP |
| NOV16d | ------------------------------------------------------------ |
| NOV16e | ------------------------------------------------------------ |
| NOV16f | ------------------------------------------------------------ |
| NOV16g | ------------------------------------------------------------ |
| NOV16h | PELAALPTPESTPVLHQKTLQAMKSHSEKAHGHGASRKETPQFFPSSPPPHSPLSHGHIP |
| NOV16i | DMFVRKNRKIHKDAESAQSCTDSSGSFAKLNGLFDSPVKEYQQNIDSPKLYSNLLTSRKE |
| NOV16j | DMFVRKNRKIHKDAESAQSCTDSSGSFAKLNGLFDSPVKEYQQNIDSPKLYSNLLTSRKE |
| NOV16k | PELAALPTPESTPVLHQKTLQAMKSHSEKAHGHGASRKETPQFFPSSPPPHSPLSHGHIP |
| NOV16l | ------------------------------------------------------------ |
| NOV16a | ------------------------------------------------------------ |
| NOV16b | ------------------------------------------------------------ |
| NOV16c | SAIVLPNATHDYNTSFSNSNAHKAEKKLQNIDHPLTKSSSKRDHRRSVDSRNTLNDLLKH |
| NOV16d | ------------------------------------------------------------ |
| NOV16e | ------------------------------------------------------------ |
| NOV16f | ------------------------------------------------------------ |
| NOV16g | ------------------------------------------------------------ |
| NOV16h | SAIVLPNATHDYNTSFSNSNAHKAEKKLQNIDHPLTKSSSKRDHRRSVDSRNTLNDLLKH |
| NOV16i | HEFSGR------------------------------------------------------ |
| NOV16j | LPPNGDTKSMVMDHRGQPPELAALPTPESTPVLHQKTLQAMKSHSEKAHGHGASRKETPQ |
| NOV16k | SAIVLPNATHDYNTSFSNSNAHKAEKKLQNIDHPLTKSSSKRDHRRSVDSRNTLNDLLKH |
| NOV16l | ------------------------------------------------------------ |
| NOV16a | ------------------------------------------------------------ |
| NOV16b | ------------------------------------------------------------ |
| NOV16c | LNDPNSNPKAIMGDIQMAHQNLMLDPNGSMSEVPPKVPNREASLYSPPSTLPRNSPTKRV |
| NOV16d | ------------------------------------------------------------ |
| NOV16e | ------------------------------------------------------------ |
| NOV16f | ------------------------------------------------------------ |
| NOV16g | ------------------------------------------------------------ |
| NOV16h | LNDPNSNPKAIMGDIQMAHQNLMLDPMGSMSEVPPKVPNREASLYSPPSTLPRNSPTKRV |
| NOV16i | ------------------------------------------------------------ |
| NOV16j | FFPSSPPPHSPLSHGHIPSAIVLPNATHDYNTSFSNSNAHKAEKKLQNIDHPLTKSSSKR |
| NOV16k | LNDPNSNPKAIMGDIQMAHQNLMLDPMGSMSEVPPKVPNREASLYSPPSTLPRNSPTKRV |
| NOV16l | ------------------------------------------------------------ |
| NOV16a | ------------------------------------------------------------ |
| NOV16b | ------------------------------------------------------------ |
| NOV16c | DVPTTPGVPMTSLERQRGYHKNSSQRHSISAMPKNLNSPNGVLLSRQPSMNRGGYMPTPT |
| NOV16d | ------------------------------------------------------------ |
| NOV16e | ------------------------------------------------------------ |
| NOV16f | ------------------------------------------------------------ |
| NOV16g | ------------------------------------------------------------ |
| NOV16h | DVPTTPGVPMTSLERQRGYHKNSSQRHSISAMPKNLNSPNGVLLSRQPSMNRGGYMPTPT |
| NOV16i | ------------------------------------------------------------ |
| NOV16j | DHRRSVDSRNTLNDLLKHLNDPNSNPKAIMGDIQMAHQNLMLDPMGSMSEVPPKVPNREA |
| NOV16k | DVPTTPGVPMTSLERQRGYHKNSSQRHSISAMPKNLNSPNGVLLSRQPSMNRGGYMPTPT |
| NOV16l | ------------------------------------------------------------ |
| NOV16a | ------------------------------------------------------------ |
| NOV16b | ------------------------------------------------------------ |
| NOV16c | GAKVDYIQGTPVSVNLQPSLSRQSSYTSNGTLPRTGLKRTPSLKPDVPPKPSFVPQTPSV |
| NOV16d | ------------------------------------------------------------ |
| NOV16e | ------------------------------------------------------------ |
| NOV16f | ------------------------------------------------------------ |
| NOV16g | ------------------------------------------------------------ |
| NOV16h | GAKVDYIQGTPVSVHLQPSLSRQSSYTSNGTLPRTGLKRTPSLKPDVPPKPSFVPQTPSV |
| NOV16i | ------------------------------------------------------------ |
| NOV16j | SLYSPPSTLPRNSPTKRVDVPTTPGVPMTSLERQRGYHKNSSQRHSISAMPKNLNSPNGV |
| NOV16k | GAKVDYIQGTPVSVHLQPSLSRQSSYTSNGTLPRTGLKRTPSLKPDVPPKPSFVPQTPSV |
| NOV16l | ------------------------------------------------------------ |
| NOV16a | ------------------------------------------------------------ |
| NOV16b | ------------------------------------------------------------ |
| NOV16c | RPLNKYTY---------------------------------------------------- |
| NOV16d | ------------------------------------------------------------ |
| NOV16e | ------------------------------------------------------------ |
| NOV16f | ------------------------------------------------------------ |
| NOV16g | ------------------------------------------------------------ |
| NOV16h | RPLNKYTY---------------------------------------------------- |
| NOV16i | ------------------------------------------------------------ |
| NOV16j | LLSRQPSNNRGGYMPTPTGAKVDYIQGTPYSVHLQPSLSRQSSYTSNGTLPRTGLKRTPS |
| NOV16k | RPLNKYTY---------------------------------------------------- |
| NOV16l | ------------------------------------------------------------ |
| NOV16a | -------------------------- |
| NOV16b | -------------------------- |
| NOV16c | -------------------------- |
| NOV16d | -------------------------- |
| NOV16e | -------------------------- |
| NOV16f | -------------------------- |
| NOV16g | -------------------------- |
| NOV16h | -------------------------- |
| NOV16i | -------------------------- |
| NOV16j | LKPDVPPKPSFVPQTPSVRPLNKYTY |
| NOV16k | -------------------------- |
| NOV16l | -------------------------- |
| NOV16a | (SEQ ID NO: 196) |
| NOV16b | (SEQ ID NO: 198) |
| NOV16c | (SEQ ID NO: 200) |
| NOV16d | (SEQ ID NO: 202) |
| NOV16e | (SEQ ID NO: 204) |
| NOV16f | (SEQ ID NO: 206) |
| NOV16g | (SEQ ID NO: 208) |
| NOV16h | (SEQ ID NO: 210) |
| NOV16i | (SEQ ID NO: 212) |
| NOV16j | (SEQ ID NO: 214) |
| NOV16k | (SEQ ID NO: 216) |
| NOV16l | (SEQ ID NO: 218) |

[0448] Further analysis of the NOV16a protein yielded the following properties shown in Table 16C.

TABLE 16C
Protein Sequence Properties NOV16a

| SignalP | Cleavage site between residues 21 and 22 | | | |
|---|---|---|---|---|
| analysis: | | | | |
| PSORT II | PSG: a new signal peptide prediction method | | | |
| analysis: | N-region: length 2; pos. chg 1; neg. chg 0 | | | |
| | H-region: length 16; peak value 9.62 | | | |
| | PSG score: 5.22 | | | |
| | GvH: von Heijne's method for signal seq. recognition | | | |
| | GvH score (threshold: −2.1): −0.82 | | | |
| | possible cleavage site: between 20 and 21 | | | |
| | >>> Seems to have a cleavable signal peptide (1 to 20) | | | |
| | ALOM: Klein et al's method for TM region allocation | | | |
| | Init position for calculation: 21 | | | |
| | Tentative number of TMS(s) for the threshold 0.5: 1 | | | |
| | Number of TMS(s) for threshold 0.5: 0 | | | |
| | PERIPHERAL | Likelihood = 1.75 (at 300) | | |
| | ALOM score: −0.32 (number of TMSs: 0) | | | |
| | MTOP: Prediction of membrane topology (Hartmann et al.) | | | |
| | Center position for calculation: 10 | | | |
| | Charge difference: −5.0 C(−3.0)-N(2.0) | | | |
| | N >= C: N-terminal side will be inside | | | |
| | MITDISC: discrimination of mitochondrial targeting seq | | | |
| | R content: | 2 | Hyd Moment(75): | 6.62 |
| | Hyd Moment(95): | 8.11 | G content: | 0 |
| | D/E content: | 1 | S/T content: | 2 |

```
Score: −2.26
Gavel: prediction of cleavage sites for mitochondrial preseq
R-2 motif at 29 LRA|VS
NUCDISC: discrimination of nuclear localization signals
pat4: none
pat7: none
bipartite: none
content of basic residues: 12.0%
NLS Score: −0.47
KDEL: ER retention motif in the C-terminus: none
ER Membrane Retention Signals:
XXRR-like motif in the N-terminus: RVFL
none
SKL: peroxisomal targeting signal in the C-terminus: none
PTS2: 2nd peroxisomal targeting signal: none
VAC: possible vacuolar targeting motif: none
RNA-binding motif: none
Actinin-type actin-binding motif:
type 1: none
type 2: none
NMYR: N-myristoylation pattern: none
Prenylation motif: none
memYQRL: transport motif from cell surface to Golgi: none
Tyrosines in the tail: none
Dileucine motif in the tail: none
checking 63 PROSITE DNA binding motifs: none
checking 71 PROSITE ribosomal protein motifs: none
checking 33 PROSITE prokaryotic DNA binding motifs: none
NNCN: Reinhardt's method for Cytoplasmic/Nuclear discrimination
Prediction: cytoplasmic
Reliability: 89
COIL: Lupas's algorithm to detect coiled-coil regions
total: 0 residues
Final Results (k = 9/23):
21.7%: mitochondrial
21.7%: endoplasmic reticulum
17.4%: extracellular, including cell wall
13.0%: vacuolar
  8.7%: cytoplasmic
  8.7%: Golgi
  8.7%: nuclear
>> prediction for CG59253-01 is mit (k = 23)
```

[0449] A search of the NOV16a protein against the Geneseq database, a proprietary database that contains sequences published in patents and patent publication, yielded several homologous proteins shown in Table 16D.

TABLE 16D
Geneseq Results for NOV16a

| | | NOV16a | Identities/ | |
|---|---|---|---|---|
| | | Residues/ | Similarities for | |
| Geneseq | Protein/Organism/Length [Patent #, | Match | the Matched | Expect |
| Identifier | Date] | Residues | Region | Value |
| AAE23981 | Human LP221 secreted protein - | 1 . . . 476 | 476/476 (100%) | 0.0 |
| | Homo sapiens, 476 aa. | 1 . . . 476 | 476/476 (100%) | |
| | [WO200226801-A2, 04 APR. 2002] | | | |
| AAG79413 | CADHP-2, Incyte ID No: | 1 . . . 476 | 476/476 (100%) | 0.0 |
| | 7596315CD1 - Homo sapiens, 1017 | 1 . . . 476 | 476/476 (100%) | |
| | aa. [WO200259312-A2, | | | |
| | 01 AUG. 2002] | | | |
| ABG79172 | Human semaphorin-like protein #1 - | 1 . . . 476 | 476/476 (100%) | 0.0 |
| | Homo sapiens, 476 aa. | 1 . . . 476 | 476/476 (100%) | |
| | [WO200264791-A2, 22 AUG. 2002] | | | |
| AAG63213 | Amino acid sequence of a human | 1 . . . 476 | 475/476 (99%) | 0.0 |
| | semaphorin-like polypeptide - Homo | 1 . . . 476 | 475/476 (99%) | |
| | sapiens, 1086 aa. [WO200153466-A1, | | | |
| | 26 JUL. 2001] | | | |
| ABG79177 | Human semaphorin-like protein #5 - | 1 . . . 476 | 471/478 (98%) | 0.0 |
| | Homo sapiens, 1088 aa. | 1 . . . 478 | 473/478 (98%) | |
| | [WO200264791-A2, 22 AUG. 2002] | | | |

[0450] In a BLAST search of public sequence databases, the NOV16a protein was found to have homology to the proteins shown in the BLASTP data in Table 16E.

TABLE 16E
Public BLASTP Results for NOV16a

| | | NOV16a | | |
|---|---|---|---|---|
| Protein | | Residues/ | Identities/ | |
| Accession | | Match | Similarities for the | Expect |
| Number | Protein/Organism/Length | Residues | Matched Portion | Value |
| Q8NFY6 | Semaphorin 6D isoform 2 - Homo | 1 . . . 476 | 476/476 (100%) | 0.0 |
| | sapiens (Human), 998 aa. | 1 . . . 476 | 476/476 (100%) | |
| Q8NFY5 | Semaphorin 6D isoform 3 - Homo | 1 . . . 476 | 476/476 (100%) | 0.0 |
| | sapiens (Human), 1017 aa. | 1 . . . 476 | 476/476 (100%) | |
| Q8NFY3 | Semaphorin 6D isoform 1 - Homo | 1 . . . 476 | 476/476 (100%) | 0.0 |
| | sapiens (Human), 1011 aa. | 1 . . . 476 | 476/476 (100%) | |
| Q8NFY7 | Semaphorin 6D short isoform - | 1 . . . 476 | 476/476 (100%) | 0.0 |
| | Homo sapiens (Human), 476 aa. | 1 . . . 476 | 476/476 (100%) | |
| Q9P249 | Hypothetical protein KIAA1479 - | 1 . . . 476 | 476/476 (100%) | 0.0 |
| | Homo sapiens (Human), 1022 aa | 12 . . . 487 | 476/476 (100%) | |
| | (fragment). | | | |

[0451] PFam analysis predicts that the NOV16a protein contains the domains shown in the Table 16F.

TABLE 16F
Domain Analysis of NOV16a

| | | Identities/ | |
|---|---|---|---|
| Pfam | | Similarities | Expect |
| Domain | NOV16a Match Region | for the Matched Region | Value |
| Sema | 59 . . . 476 | 197/494 (40%) | 1.3e−173 |
| | | 348/494 (70%) | |

### Example 17

[0452] The NOV17 clone was analyzed, and the nucleotide and encoded polypeptide sequences are shown in Table 17A.

TABLE 17A
NOV17 Sequence Analysis

| | | |
|---|---|---|
| NOV17a, CG95430-02 | SEQ ID NO: 229 | 954 bp |

| | | |
|---|---|---|
| DNA Sequence | ORF Start: at 7 | ORF Stop: at 949 |

GGATCCCAGGACACCTGCAGGCAAGGGCACCCTGGGATCCCTGGGAACCCCGGTCACAATGGTCTGCCTGGAA
GAGATGGACGAGACGGAGCGAAGGGTGACAAAGGCGATGCAGGAGAACCAGGACGTCCTGGCAGCCCGGGGAA
GGATGGGACGAGTGGAGAGAAGGGAGAACGAGGAGCAGATGGAAAAGTTGAAGCAAAAGGCATCAAAGGTGAT
CAACGCTCAAGAGGATCCCCAGGAAAACATGGCCCCAAGGGGCTTGCAGGGCCCATGGGAGACAAAGGCCTCC
GAGGAGAGACTGGGCCTCAGGGGCAGAAGGGGAATAACGGTGACGTGGGTCCCACTGGTCCTGAGGGGCCAAG
CGGCAACATTGGGCCTTTGGGCCCAACTGGTTTACCGGGCCCCATGGGCCCTATTGGAAAGCCTGGTCCCAAG
GGAGAAGCTGGACCCACGGGGCCCCAGGGTGAGCCAGGAGTCCGCGGAATAAGAGGCTCGAAAGGAGATCGAG
GAGAGAAAGGGAAAATCGGTGAGACTCTAGTCTTGCCAAAAAGTGCTTTCACTGTGGGGCTCACGGTGCTCAG
CAAGTTTCCTTCTTCAGATCTGCCCATTAAATTTGATAAGATCCTGTATAACGAATTCAACCATTATGATACA
GCAGCGGGGAAATTCACGTGCCACATTGCTGCCGTCTATTACTTCACCTACCACATCACTGTTTTCTCCAGGA
ATGTTCAGGTGTCTTTGGTCAAAAATGGAGTAAAAATACTGCACACCAAACATGCTTACATGAGCTCTGAGGA
CCAGGCCTCTGGCGGCATTGTCCTGCAGCTGAAGCTCGGGGATGAGGTGTGGCTGCACGTGACAGGAGGAGAG
AGGTTCAATGGCTTGTTTGCTGATGAGGACGATGACACAACTTTCACAGGGTTCCTTCTGTTCACCAGCCCGC
TCGAG

NOV17a, CG95430-02

| | | | |
|---|---|---|---|
| Protein Sequence | SEQ ID NO: 230 | 314 aa | MW at 32420.0kD |

QDTCRQGHPGIPGNPGHNGLPGRDGRDCAKGDKGDAGEPGRPGSPGKDGTSGEKGERGADGKVEAKGIKGDQG
SRGSPGKHGPKGLAGPMGEKCLRGETGPQGQKGNKGDVGPTGPEGPRGNIGPLGPTGLPGPMCPIGKPGPKGE
AGPTGPQGEPGVRGIRGWKGDRGEKGKIGETLVLPKSAFTVGLTVLSKFPSSDVPIKFDKILYNEFNHYDTAA
GKFTCHIAGVYYFTYHITVFSRNVQVSLVKNGVKILHTKDAYMSSEDQASGGIVLQLKLCDEVWLQVTGGERF
NGLFADEDDDTTFTGFLLFSSP

| | | |
|---|---|---|
| NOV17b, CG95430-04 | SEQ ID NO: 231 | 1026 bp |

| | | |
|---|---|---|
| DNA Sequence | ORF Start: ATG at 16 | ORF Stop: TGA at 1015 |

TCTGTCATCTGAACCATGAGGATCTGGTGGTTTCTGCTTGCCATTGAAATCTGCACACGGAACATAAACTCAC
AGGACACCTGCAGGCAAGGGCACCCTGGCATCCCTGGGAACCCCGGTCACAATGGTCTGTCTGGAAGAGATGG
ACGAGACGGAGCGAAGGGTGACAAAGGCGATGCAGGAGAACCAGGACGTCCTGGCAGCCCGGCGAAGGATGGG
ACGAGTGGAGACAAGGGAGAACGAGCAGCAGATGGAAAAGTTGAAGCAAAAGGCATCAAAGGTGATCAAGGCT
CAAGAGGATCCCCAGGAAAACATGGCCCCAAGGGGCTTCCAGGGCCCATGGGAGAGAAGGGCCTCCGAGGAGA
GACTGGGCCTCAGGGGCAGAAGGGGAATAAGGGTGACGTGGGTCCCACTGCTCCTGAGGGGCCAAGGGGCAAC
ATTGGGCCTTTGGGCCCAACTGGTTTACCGGGCCCCATGGGCCCTATTGGAAAGCCTGGTCCCAAAGGAGAAG
CTGCACCCACGGCGCCCCAGGGTGAGCCAGGAGTCCGGGGAATAAGAGGCTGGAAAGGAGATCGAGGAGAGAA
AGGGAAAATCGGTGAGACTCTAGTCTTGCCAAAAAGTGCTTTCACTGTGGGGCTCACGGTGCTGAGCAAGTTT
CCTTCTTCAGATATGCCCATTAAATTTGATAAGATCCTGTATAACGAATTCAACCATTATGATACAGCAGCGG
GCAAATTCACGTGCCACATTGCTGGGGTCTATTACTTCACCTACCACATCACTGTTTTCTCCAGGAATGTTCA
GGTGTCTTTGGTCAAAAATGGAGTAAAAATACTGCACACCAAAGATGCTTACATGAGCTCTGAGGACCAGGCC
TCTGGCGGCATTGTCCTGCAGCTGAAGCTCGGGCATGAGGTGTGGCTGCAGGTGACAGGAGGAGAGAGGTTCA
ATGGCTTGTTTGCTGATGAGGACGATGACACAACTTTCACAGGGTTCCTTCTGTTCAGCAGCCAGTGACAGAG
GAGA

| | |
|---|---|
| NOV17b, CG95430-04 | +TL,19 |

| | | | |
|---|---|---|---|
| Protein Sequence | SEQ ID NO: 232 | 333 aa | MW at 34735.7kD |

MRIWWFLLATEICTGNINSQDTCRQGIIPGIPGNPGHNGLSGRDGRDGAKGDKGDAGEPGRPGSPGKDGTSGEK
GERGADGKVEAKGIKGDQGSRGSPGKHGPKGLAGPMGEKGLRGETGPQGQKGNKGDVGPTGPEGPRGNIGPLG
PTGLPGPMGPIGKPGPKGEAGPTGPQGEPGVRGIRGWKGDRGEKGKIGETLVLPKSAFTVGLTVLSKFPSSDM
PIKFDKILYNEFNHYDTAAGKFTCHIAGVYYFTYHITVFSRNVQVSLVKNGVKILHTKDAYMSSEDQASGGIV
LQLKLGDEVWLQVTGGERFNGLFADEDDDTTFTGFLLFSSQ

| | | |
|---|---|---|
| NOV17c, CG95430-01 | SEQ ID NO: 233 | 818 bp |

| | | |
|---|---|---|
| DNA Sequence | ORF Start: ATG at 35 | ORF Stop: TGA at 728 |

TCCCTCTTTCAGTTCAGAGTCTGTCATCTGAACCATGAGGATCTGGTGGCTTCTGCTTGCCATTGAAATCTGC
ACAGGGAACATAAACTCACAGGACACCTGCAGGCAACGGCACCCTGGAATCCCTGCGAACCCCGGTCACAATG
GTCTGCCTGGAAGAGATGGACGAGACGGAGCGAAGGGTGACAAAGGCGATGCAGGTAAGCCTGGTCCCAAAGG
AGAAGCTGGACCCACGGGGCCCCAGGGTGAGCCAGGAGTCCGGGGAATAAGAGCCTGGAAAGGAGATCGAGGA
GAGAAAGGGAAAATCGGTGAGACTCTAGTCTTGCCAAAAAGTGCTTTCACTGTGGCGCTCACGGTGCTGAGCA
AGTTTCCTTCTTCAGATATCCCCATTAAATTTGATAAGATCCTGTATAACGAATTCAACCATTATGATACAGC
AGCGGGGAAATTCACGTGCCACATTGCTGGGGTCTATTACTTCACCTACCACATCACTGTTTTCTCCAGAAAT
GTTCAGGTGTCTTTGGTCAAAAATGGAGTAAAAATACTGCACACCAAAGATGCTTACATGAGCTCTGAGGACC
AGGCCTCTGGCGGCATTGTCCTGCAGCTGAAGCTCGGGGATGAGGTGTGGCTGCAGGTGACAGGAGGAGAGAG
GTTCAATGGCTTGTTTGCTGATGAGGACGATGACACAACTTTCACAGGGTTCCTTCTGTTCAGCAGCCCGTGA
CAGAGGAGAGTTTAAAAATCCGCCACACCATCCATCAGAATCAGCTTGGGATGAACTTATTCAGATGGTTTTA
CTTTATTAATTCCTC+TZ,1/46

NOV17c, CG95430-01

| | | | |
|---|---|---|---|
| Protein Sequence | SEQ ID NO: 234 | 231 aa | MW 24946.0kD |

MRWWLLLAIEICTGNINSQDTCRQGHPGIPGNPGHNGLPGRDGRDGAKGDKGDAGKPGPKCEAGPTGPQGEP
IGVRGIRGWKGDRGEKCKIGETLVLPKSAFTVGLTVLSKFPSSDMPIKFDKILYNEFNHYDTAAGKFTCHIAGV
IYYFTYHITVFSRNVQVSLVKNGVKILHTKDAYMSSEDQASGGIVLQLKLGDEVWLQVTGGERFNGLFADEDDD
TTFTGFLLFSSP

| | | |
|---|---|---|
| NOV17d, 319194717 | SEQ ID NO: 235 | 1024 bp |

| | | |
|---|---|---|
| DNA Sequence | ORF Start: at 2 | ORF Stop: TGA at 1013 |

CACCGGATCCACCATGAGGATCTGGTGGTTTCTGCTTGCCATTGAAATCTGCACAGGGAACATAAACTCTCAG
GACACCTGCAGGCAAGGGCACCCTGGAATCCCTGGGAACCCCGGTCACAATGGTCTGCCTGGAAGAGATGGAC
GAGACGGAGCGAAGGGTGACAAAGGCGATGCAGGAGAACCACGACGTCCTGGCAGCCCGGGGAAGGATGGGAC
GAGTGCAGAGAAGGGAGAACGAGGAGCAGATGGAAAAGTTGAAGCAAAAGGCATCAAAGGTGATCAAGGCTCA
AGACGATCCCCAGGAAAACATGGCCCCAAGGGGCTTCCAGGGCCCATGGGAGAGAAAGGCCTCCGAGGAGAGA
CTGGGCCTCAGGGGCAGAAGGGGAATAAGGGTGACGTGGGTCCCACTGGTCCTGAGGGGCCAAGGGGCAACAT
TGGGCCTTTGGGCCCAACTGGTTTACCGGGCCCCATGGGCCCTATTGGAAAGCCTGGTCCCAAGGGAGAAGCT
GCACCCACGGGGCCCCACGGTGAGCCAGGAGTCCCGGGAATAAGAGGCTGCAAAGGAGATCGAGGAGAGAAAG
GGAAAATCGGTGAGACTCTAGTCTTGCCAAAAACTGCTTTCACTGTGGGGCTCACGGTGCTGAGCAAGTTTCC
TTCTTCAGATGTGCCCATTAAATTTGATAAGATCCTGTATAACGAATTCAACCATTATGATACAGCAGCGGGG
AAATTCACCTGCCACATTGCTGGGGTCTATTACTTCACCTACCACATCACTGTTTTCTCCAGGAATGTTCAGG
TGTCTTTGGTCAAAAATGGAGTAAAAATACTGCACACCAAAGATGCTTACATGAGCTCTGAGGACCAGGCCTC
TGGCGGCATTGTCCTGCAGCTGAAGCTCGGGGATGAGGTGTGGCTGCAGGTGACAGGAGGAGAGAAGTTCAAT
GGCTTGTTTGCTGATGAGCACGATGACACAACTTTCACAGGGTTCCTTCTGTTCAGCAGCCCGTGAGTCGACG
GC+TZ,1/46

NOV17d, 319194717

| | | | |
|---|---|---|---|
| Protein Sequence | SEQ ID NO: 236 | 337 aa | Mw at 35001.0kD |

TGSTMRIWWFLLAIEICTGNINSQDTCRQGHPGIPGNPGHNGLPGRDGRDGAKGDKGDAGEPGRPGSPGKDGT
SGEKGERGADGKVEAKGIKGDQGSRGSPGKHGPKGLAGPMGEKGLRGETGPQGQKGNKGDVGPTGPEGPRGNI
GPLGPTGLPGPMGPIGKPGPKGEAGPTGPQGEPGVRGIRGWKGDRGEKGKIGETLVLPKSAFTVGLTVLSKFP
SSDVPIKFDKILYNEFNHYDTAAGKFTCHIAGVYYFTYHITVFSRNVQVSLVKNGVKILHTKDAYMSSEDQAS
GGIVLQLKLGDEVWLQVTGGEKFNGLFADEDDDTTFTGFLLFSSP

| | | |
|---|---|---|
| NOV17e, CG95430-03 | SEQ ID NO: 237 | 405 bp |

| | | |
|---|---|---|
| DNA Sequence | ORF Start: at 7 | ORF Stop: at 400 |

GGATCCGCTTTCACTGTGGGGCTCACGGTGCTGAGCAAGTTTCCTTCTTCACATATGCCCATTAAATTTGATA
AGATCCTGTATAACGAATTCAACCATTATGATACAGCAGCGGGGAAATTCACGTGCCACATTGCTGGGGTCTA
TTACTTCACCTACCACATCACTGTTTTCTCCAGGAATGTTCAGGTGTCTTTGGTCAAAAATGGAGTAAAAATA
CTGCACACCAAAGATGCTTACATGAGCTCTGAGGACCAGGCCTCTGCCGGCATTGTCCTGCAGCTGAGGCTCG
GGGATGACGTGTGGCTGCAGGTGACAGGAGGAGAGAGGTTCAATGGCTTGTTTGCTGATGAGGACGATGACAC
AACTTTCACAGGGTTCCTTCTGTTCAGCAGCCCGCTCGAG

NOV17e, CG95430-03

| | | | |
|---|---|---|---|
| Protein Sequence | SEQ ID NO: 238 | 131 aa | MW at 14607.4kD |

AFTVGLTVLSKFPSSDMPIKFDKILYNEFNHYDTAAGKFTCHIAGVYYFTYHITVFSRNVQVSLVKNGVKILH
TKDAYNSSEDQASGGIVLQLKLGDEVWLQVTGGERFNGLFADEDDDTTFTGFLLFSSP

| | | |
|---|---|---|
| NOV17f, CG95430-05 | SEQ ID NO: 239 | 149bp |

| | | |
|---|---|---|
| DNA Sequence | ORF Start: ATG at 143 | ORF Stop: TGA at 1061 |

CAGTATCTGGGTCCAGCCTGCAGCCTTAGGGTCCAGGTGATGTTACCGTGTGTCTGGCCCTTCTTCACAGTGG
CCTCCTAGAAAAACAAGACCCTGACTCAAAGAACACCTCTCACTACATTCAGAGTCTGTCATCTGAACCATGA
GGATCTGGTGGCTTCTGCTTGCCATTGAAATCTGCACAGGGAACATAAACTCACAGGACACCTGCAGGCAAGG
GCACCCTGGAATCCCTGGGAACCCCGGTCACAATGGTCTGCCTGGAAGAGATGGACGAGACGGAGCGAAGGGT
GACAAGGCGATGCAGGAGAACCAGGACGTCCTGGCAGCCCGGGGAAGGATGGGACGAGTGGAGACGAGGGGAG
AACGAGGAGCAGATGGAAAAGTTGAAGCAAAAGGCATCAAAGGTGATCAAGGCTCAAGAGGATCCCCAGGAAA
ACATGGCCCCAAGGGGCTTGCAGGGCCCATGGGAGAGAAAGGCCTCCGAGGAGAGACTGGGCCTCAGGGGCAG
AAGGGGAATAAGGCTGACGTGGGTCCCACTGGTCCTGAGGGGCCAAGGGGCAACATTGGGCCTTTGGGCCCAA
CTGGTTTACCGGGCCCCATGGGCCCTATTGGAAAGCCTGGTCCCAAGGGAGAAGCTGGACCCACGGGGCCCCA
GGGTGAGCCAGGAGTCCGGGGAATAAGAGGCTGGAAAGGAGATCGAGGAGAGAAAGGGAAAATCGGTGAGACT
CTAGTCTTGCCAAAAAGTGCTTTCACTGTGGGGCTCACGGTGCTGAGCAAGTTTCCTTCTTCAGATGTGCCCA
TTAAATTTGATAAGATCCACATCACTGTTTTCTCCAGGAATGTTCAGGTGTCTTTGGTCAAAAACGGAGTAAA
AATACTGCACACCAGAGATGCTTACGTGAGCTCTGAGGACCAGGCCTCTGGCAGCATTGTCCTGCAGCTGAAG
CTCGGGGATGAGATGTGGCTGCAGGTGACAGGAGGAGAGAGGTTCAATGGCTTGTTTGCTGATGAGGACGATG
ACACAACTTTCACAGGGTTCCTTCTGTTCAGCAGCCAGTGACAGAGGAGAGTTTATAAATCTGCCAGACCATC
CATCAGAATCAGCTTGGGATGAACTTATTCAGATGGTTTTACTTTATTAATTCA+TZ,1/46

NOV17f, CG95430-05

| | | | |
|---|---|---|---|
| Protein Sequence | SEQ ID NO: 240 | 306 aa | MW at 31546.2kD |

MRIWWLLLAIEICTGNINSQDTCRQGHPGIPGNPGHNGLPGRDGRDGAKGDKGDAGEPGRPGSPGKDGTSGEK
GERGADGKVEAKGIKGDQGSRGSPGKHGPKGLAGPMGEKGLRGETGPQGQKGNKGDVGPTGPEGPRGNIGPLG
PTGLPGPMGPIGKPGPKGEAGPTGPQGEPGVRGIRGWKGDRGEKGKIGETLVLPKSAFTVGLTVLSKFPSSDV
PTKFDKIHITVFSRNVQVSLVKNGVKILHTRDAYVSSEDQASGSIVLQLKLGDEMWLQVTGGERFNGLFADED
DDTTFTGFLLFSSQ

| | | |
|---|---|---|
| NOV17g, CG95430-06 | SEQ ID NO: 241 | 889 bp |

| | | |
|---|---|---|
| DNA Sequence | ORF Start: ATG at 16 | ORF Stop: TGA at 880 |

TCTGTCATCTGAACCATGAGGATCTGGTGGTTTCTGCTTGCCATTGAAATCTGCACAGGGAACATAAACTCAC
AGGACACCTGCAGGCAAGGGCACCCTGGCATCCCTGGGAACCCCGGTCACAATGGTCTGTCTGGAAGAGATGG
ACGAGACGGAGCCAAGGGTGACAAAGGCGATGCAGGAGAACCAGGACGTCCTGGCAGCCCGGGGAAGGATGGG
ACGAGTGGAGAGAAGGGAGAACGAGGAGCAGATGGAAAAGTTGAAGCAAAAGGCATCAAAGGTGATCAAGGCT
CAAGAGGATCCCCAGGAAAACATGGCCCCAAGGGGCTTGCAGGGCCCATGGGAOAGAAACGCCTCCGAGGAGA
GACTGGGCCTCAGGCGCAGAAGGGGAATAAGGGTGAGCCAGGAGTCCGGGGAATAAGAGGCTGGAAAGGAGAT
CGAGGAGAGAAAGGGAAAATCGGTGAGACTCTAGTCTTGCCAAAAAGTGCTTTCACTGTGGGGCTCACGGTGC
TGAGCAAGTTTCCTTCTTCAGATGTGCCCATTAAATTTGATAAGATCCTGTATAACGAATTCAACCATTATGA
TACAGCAGCCGGGAAATTCACGTGCCACATTGCTGGGGTCTATTACTTCACCTACCACATCGCTGTTTTCTCC
AGCAATGTTCAGGTGTCTTTGGTCAAAAATGGAGTAAAAATACTGCACACCAAAGATGCTTACATGAGCTCTG
AGGACCAGGCCTCTGGCGGCATTGTCCTGCAGCTGAAGCTCGGGGATGAGGTGTGGCTGCAGGTGACAGGAGG
AGAGAGGTTCAATGGCTTGTTTGCTGATGAGGACGATGACACAACTTTCACAGGGTTCCTTCTGTTCAGCACC
CAGTGACAGAGGA+TZ,1/46

NOV17g, CG95430-06

| | | | |
|---|---|---|---|
| Protein Sequence | SEQ ID NO: 242 | 288 aa | Mw at 30497.9kD |

MRIWWFLLAIEICTGNINSQDTCRQGHPGIPGNPGHNGLSGRDGRDGAKGDKGDAGEPGRPGSPGKDGTSGEK
GERGADGKVEAKGTKGDQGSRGSPGKHGPKGLAGPMGEKGLRGETGPQGQKGNKGEPGVRGIRGWKGDRGEKG
KIGETLVLPKSAFTVGLTVLSKFPSSDVPIKFDKILYNEFNHYDTAAGKFTCHIAGVYYFTYHIAVFSSNVQV
SLVKNGVKILHTKDAYMSSEDQASGGIVLQLKLGDEVWLQVTGGERFNGLFADEDDDTTFTGFLLFSSQ

| | | |
|---|---|---|
| NOV17h, CG95430-07 | SEQ ID NO: 243 | 961 bp |

| | | |
|---|---|---|
| DNA Sequence | ORF Start: at 11 | ORF Stop: at 953 |

CACCAGATCTCAGGACACCTGCAGGCAAGGGCACCCTGGGATCCCTGGGAACCCCGGTCACAATGGTCTGCCT
GCAAGAGATGGACGAGACGGAGCGAAGGGTGACAAAGGCGATGCAGGAGAACCAGGACGTCCTGGCAGCCCGG
GGAAGGATGGGACGAGTGGAGAGAAGGGAGAACGAGGAGCAGATGGAAAAGTTGAAGCAAAAGGCATCAAAGG
TGATCAAGGCTCAAGAGGATCCCCAGGAAAACATGGCCCCAAGGGGCTTGCAGGGCCCATGGGAGAGAAAGGC
CTCCGAGGAGAGACTGGGCCTCAGGGGCAGAAGGGGAATAAGGGTGACGTGGGTCCCACTGGTCCTGAGGGGC
CAAGGGGCAACATTGGGCCTTTGGGCCCAACTGGTTTACCGGGCCCCATGGGCCCTATTGGAAAGCCTGGTCC
CAAGGGAGAAGCTGGACCCACGGGGCCCCAGGGTGAGCCAGGAGTCCGGGGAATAAGAGGCTGGAAAGGAGAT
CGAGGAGAGAAAGGGAAAATCGGTGAGACTCTAGTCTTGCCAAAAAGTGCTTTCACTGTGGGGCTCACGGTGC
TGACCAAGTTTCCTTCTTCAGATGTGCCCATTAAATTTGATAAGATCCTGTATAACGAATTCAACCATTATGA
TACAGCAGCGGGGAAATTCACGTCCCACATTGCTGGGGTCTATTACTTCACCTACCACATCACTGTTTTCTCC
ACGAATGTTCAGGTGTCTTTGGTCAAAAATGGAGTAAAAATACTGCACACCAAAGATGCTTACATGAGCTCTG
AGGACCAGGCCTCTGGCGGCATTGTCCTGCAGCTGAAGCTCGGGGATGAGGTGTGGCTGCAGGTGACAGGAGG
AGAGAGGTTCAATGGCTTGTTTGCTGATGAGGACGATGACACAACTTTCACAGGGTTCCTTCTGTTCAGCAGC
CCGGTCGACGGC+TZ,1/46

NOV17h, CG95430-07

| | | | |
|---|---|---|---|
| Protein Sequence | SEQ ID NO: 244 | 314 aa | Mw at 32420.0kD |

QDTCRQGHPGIPGNPGHNGLPGRDGRDGAKGDKGDAGEPGRPGSPGKDGTSGEKGERGADGKVEAKGIKGDQG
SRGSPGKHGPKGLAGPMGEKGLRGETGPQGQKGNKGDVGPTGPEGPRGNIGPLGPTGLPGPMGPIGKPGPKGE
AGPTGPQGEPGVRGIRGWKGDRGEKGKIGETLVLPKSAFTVGLTVLSKFPSSDVPIKFDKILYNEFNHYDTAA
GKFTCHIAGVYYFTYHITVFSRNVQVSLVKNGVKILHTKDAYMSSEDQASGGIVLQLKLGDEVWLQVTGGERF
NGLFADEDDDTTFTGFLLFSSP

| | | |
|---|---|---|
| NOV17i, CG95430-08 | SEQ ID NO: 245 | 1024 bp |

| | | |
|---|---|---|
| DNA Sequence | ORF Start: ATG at 14 | ORF Stop: TGA at 1013 |

CACCGGATCCACCATGAGGATCTGGTGGTTTCTGCTTGCCATTGAAATCTGCACAGGGAACATAAACTCAG
GACACCTGCAGGCAAGGGCACCCTGGAATCCCTGGCAACCCCGGTCACAATGGTCTGCCTGGAACAGATGGAC
GAGACGGAGCGAAGGGTGACAAAOGCGATGCAGGAGAACCAGGACGTCCTGGCAGCCCGGGGAAGGATGGGAC
GAGTGGAGAGAAGGGAGAACGAGGAGCAGATGGAAAAGTTGAAGCAAAAGGCATCAAAGGTGATCAAGGCTCA
AGAGGATCCCCAGGAAAACATGGCCCCAAGGGGCTTGCAGGGCCCATGGGAGAGAAAGGCCTCCGAGGAGAGA
CTGGGCCTCAGGGGCAGAAGGGGAATAAGGGTGACGTGGGTCCCACTGGTCCTGAGGGGCCAAGGGGCAACAT
TGGGCCTTTGGGCCCAACTGGTTTACCGCGCCCCATGGGCCCTATTGGAAAGCCTGGTCCCAAGGGAGAAGCT
GGACCCACGGGCCCCCAGGGTGAGCCAGGAGTCCGGGGAATAAGAGGCTGGAAAGGAGATCGAGGAGAGAAAG
GGAAAATCGGTGAGACTCTAGTCTTGCCAAAAAGTGCTTTCACTGTGGGGCTCACGGTGCTGAGCAAGTTTCC
TTCTTCAGATGTGCCCATTAAATTTGATAAGATCCTGTATAACGAATTCAACCATTATCATACAGCAGCGGGG
AAATTCACGTGCCACATTGCTGGGGTCTATTACTTCACCTACCACATCACTGTTTTCTCCAGGAATGTTCAGG
TGTCTTTGGTCAAAAATCGAGTAAAAATACTGCACACCAAAGATGCTTACATGAGCTCTGAGGACCAGGCCTC
TGGCGGCATTGTCCTGCAGCTGAAGCTCGGGGATGAGGTGTGGCTGCAGGTGACAGGAGCAGAGAAGTTCAAT
GGCTTGTTTGCTGATGAGGACGATGACACAACTTTCACAGGGTTCCTTCTGTTCAGCAGCCCGTGAGTCGACG
GC+TZ,1/46

NOV17i, CG95430-08

| | | | |
|---|---|---|---|
| Protein Sequence | SEQ ID NO: 246 | 333 aa | MW at 34654.7kD |

MRIWWFLLAIEICTGNINSQDTCRQGHPGIPGNPGHNGLPGRDGRDGAKGDKGDAGEPCRPGSPGKDGTSCEK
GERGADGKVEAKGIKGDQGSRGSPGKHGPKGLAGPMGEKGLRGETGPQGQKGNKGDVGPTGPEGPRGNIGPLG
PTGLPCPMGPIGKPGPKGEAGPTGPQGEPGVRGIRGWKGDRGEKGKIGETLVLPKSAFTVCLTVLSKFPSSDV
PIKFDKILYNEFNHYDTAAGKFTCHIAGVYYFTYHITVFSRNVQVSLVKNGVKILHTKDAYMSSEDQASGGIV
LQLKLGDEVWLQVTGGEKFNGLFADEDDDTTFTGFLLFSSP

| | | |
|---|---|---|
| NOV 17j, CG95430-09 | SEQ ID NO: 247 | 964 bp |

| | | |
|---|---|---|
| DNA Sequence | ORF Start: at 11 | ORF Stop: TAG at 953 |

CACCAGATCTCAGGACACCTCCAGGCAAGGGCACCCTGGGATCCCTGGGAACCCCGGTCACAATGGTCTGCCT
GGAAGAGATGGACGAGACGGAGCGAAGGGTGACAAAGGCGATGCAGGAGAACCAGGACGTCCTGGCAGCCCGG
CGAAGGATGGGACGAGTGGAGAGAAGGGAGAACGAGGAGCAGATGGAAAAGTTCAAGCAAAAGGCATCAAAGG
TGATCAAGGCTCAAGAGGATCCCCAGGAAAACATGGCCCCAAGGGGCTTGCAGGGCCCATGGGAGAGAAAGGC
CTCCGAGGAGAGACTGGGCCTCAGGGGCAGAAGGGGAATAAGGGTGACGTGGGTCCCACTGGTCCTGAGGGGC
CAAGGGGCAACATTGGGCCTTTGGGCCCAACTGGTTTACCGGGCCCCATGGGCCCTATTGGAAAGCCTGGTCC
CAAGGGAGAAGCTGGACCCACGGGGCCCCAGGGTGAGCCAGGAGTCCGGGGAATAAGAGGCTGCAAAGGAGAT
CGAGGAGAGAAAGGGAAAATCGGTGAGACTCTAGTCTTGCCAAAAAGTGCTTTCACTGTGGGGCTCACGGTGC
TGAGCAAGTTTCCTTCTTCAGATGTGCCCATTAAATTTGATAAGATCCTGTATAACGAATTCAACCATTATGA
TACAGCAGCGGGGAAATTCACCTGCCACATTGCTGGGGTCTATTACTTCACCTACCACATCACTGTTTTCTCC
AGGAATGTTCAGGTGTCTTTGGTCAAAAATGGAGTAAAAATACTGCACACCAAAGATGCTTACATGAGCTCTG
AGGACCAGGCCTCTGGCGGCATTGTCCTGCAGCTGAAGCTCGGGGATGAGGTGTGGCTGCAGGTGACAGGAGG
AGAGAGGTTCAATGGCTTGTTTGCTGATGAGGACGATGACACAACTTTCACAGGGTTCCTTCTGTTCAGCAGC
CCGTAGGTCGACGGC+TZ,1/46

NOV17j, CG95430-09

| | | | |
|---|---|---|---|
| Protein Sequence | SEQ ID NO: 248 | 314 aa | MW at 32420.0kD |

QDTCRQGHPGIPGNPGHNGLPGRDGRDGAKGDKGDAGEPGRPGSPGKDGTSGEKGERGADGKVEAKGIKGDQG
SRGSPGKHGPKGLAGPMGEKGLRGETGPQGQKGNKGDVGPTGPEGPRGNIGPLGPTGLPGPMGPIGKPGPKGE
AGPTGPQGEPGVRGIRGWKGDRGEKGKIGETLVLPKSAFTVGLTVLSKFPSSDVPIKFDKILYNEFNHYDTAA
GKFTCHIAGVYYFTYHITVFSRNVQVSLVKNGVKILHTKDAYMSSEDQASGGIVLQLKLGDEVWLQVTGGERF
NGLFADEDDDTTFTGFLLFSSP

| | | |
|---|---|---|
| NOV17k, CG95430-10 | SEQ ID NO:249 | 1024 bp |

| | | |
|---|---|---|
| DNA Sequence | ORF Start: ATG at 17 | ORF Stop: at 1016 |

CACCAGATCTCCCACCATGAGGATCTGGTGGTTTCTGCTTGCCATTGAAATCTGCACAGGGAACATAAACTCT
CAGCACACCTGCAGGCAACCGCACCCTGGAATCCCTGGGAACCCCGGTCACAATGGTCTGCCTGGAAGAGATG
GACGAGACGGAGCGAAGGGTGACAAAGGCGATGCAGGAGAACCAGGACGTCCTGGCAGCCCGGGGAAGGATGG
GACGAGTGGAGAGAAGGGAGAACGAGGAGCAGATGGAAAAGTTGAAGCAAAAGGCATCAAAGGTGATCAAGGC
TCAACAGGATCCCCAGGAAAACATGGCCCCAAGGGGCTTCCAGGGCCCATGGGAGAGAAAGGCCTCCGAGGAG
AGACTGGGCCTCAGGGGCAGAAGGGGAATAAGGGTGACGTGGGTCCCACTGGTCCTGAGGGGCCAAGGGGCAA
CATTGGGCCTTTCGGCCCAACTGGTTTACCGGGCCCCATGGGCCCTATTGGAAAGCCTGGTCCCAAGGGAGAA
GCTGGACCCACGGGGCCCCAGGGTGAGCCAGGAGTCCGGGGAATAAGAGGCTGGAAAGGAGATCGAGGAGAGA
AAGGGAAAATCGGTGAGACTCTAGTCTTGCCAAAAAGTGCTTTCACTGTGGGGCTCACGGTGCTGAGCAAGTT
TCCTTCTTCAGATGTGCCCATTAAATTTGATAAGATCCTGTATAACGAATTCAACCATTATGATACAGCAGCG
GGGAAATTCACGTGCCACATTGCTGGGGTCTATTACTTCACCTACCACATCACTGTTTTCTCCAGGAATGTTC
AGGTGTCTTTGGTCAAAAATGGAGTAAAAATACTGCACACCAAACATGCTTACATGAGCTCTGAGGACCAGGC
CTCTGGCGGCATTGTCCTGCAGCTGAAGCTCGGGGATGAGGTGTGGCTGCACGTGACAGGAGCAGAGAAGTTC
AATGGCTTGTTTGCTCATGAGGACGATGACACAACTTTCACAGGGTTCCTTCTGTTCAGCAGCCCGCTCGAGG
GC+TZ,1/46

NOV17k, CG95430-10

| | | | |
|---|---|---|---|
| Protein Sequence | SEQ ID NO: 250 | 333 aa | MW at 34654.7kD |

MRIWWFLLAIEICTGNIMSQDTCRQGHPGIPGMPGHNGLPGRDGRDGAKGDKGDAGEPGRPGSPGKDGTSGEK
GERGADGKVEAKGIKGDQGSRGSPGKHGPKGLAGPMGEKGLRGETCPQGQKGNKGDVGPTGPEGPRGNIGPLG
PTGLPGPMGPIGKPGPKGEAGPTGPQGEPGVRGIRGWKGDRGEKGKIGETLVLPKSAFTVGLTVLSKFPSSDV
PIKFDKILYNEFNHYDTAAGKFTCHIAGVYYFTYHITVFSRNVQVSLVKNGVKILHTKDAYMSSEDQASGGIV
LQLKLGDEVWLQVTGGEKFNGLFADEDDDTTFTGFLLFSSP

| | | |
|---|---|---|
| NOV17l, CG95430-11 | SEQ ID NO: 251 | 1045 bp |

| | | |
|---|---|---|
| DNA Sequence | ORF Start: ATG at 14 | ORF Stop: TAA at 1034 |

CACCAGATCTACCATGGGCCACCATCACCACCATCACAGGATCTGGTGGTTTCTGCTTGCCATTGAAATCTCC
ACAGGGAACATAAACTCTCACGACACCTGCAGGCAAGGGCACCCTGGAATCCCTGCGAACCCCGGTCACAATG
GTCTGCCTGGAAGAGATGGACGAGACGGAGCGAAGGGTGACAAAGGCGATGCAGGAGAACCAGGACGTCCTGG
CACCCCGGGGAAGGATGGCACGAGTGGAGAGAAGGGAGAACGAGGAGCAGATGGAAAAGTTGAAGCAAAAGGC
ATCAAAGGTGATCAAGGCTCAAGAGGATCCCCAGGAAAACATGGCCCCAACGGGCTTGCAGGGCCCATGGGAG
AGAAAGGCCTCCGAGGAGAGACTGGGCCTCAGGGGCAGAAGGGGAATAAGGGTGACGTGGGTCCCACTGGTCC
TGAGGGGCCAAGGGGCAACATTGGGCCTTTGGGCCCAACTGGTTTACCGGGCCCCATGGGCCCTATTGGAAAG
CCTGGTCCCAACGGAGAAGCTGGACCCACGGGGCCCCAGGGTGAGCCAGGAGTCCGGGGAATAAGAGGCTGGA
AAGGAGATCGAGGAGACAAAGGGAAAATCGGTGAGACTCTAGTCTTGCCAAAAAGTGCTTTCACTGTGGGGCT
CACGGTGCTGAGCAAGTTTCCTTCTTCAGATGTGCCCATTAAATTTGATAAGATCCTGTATAACGAATTCAAC
CATTATGATACAGCAGCGGGGAAATTCACGTGCCACATTGCTGGGGTCTATTACTTCACCTACCACATCACTG
TTTTCTCCAGGAATGTTCAGGTGTCTTTGGTCAAAAATGGAGTAAAAATACTGCACACCAAAGATGCTTACAT
GAGCTCTGAGGACCACGCCTCTGGCGGCATTGTCCTGCAGCTGAAGCTCCGGGATGAGGTGTGGCTGCAGGTG
ACAGGAGGAGAGAAGTTCAATGGCTTGTTTGCTGATGAGGACCATGACACAACTTTCACAGGGTTCCTTCTGT
TCAGCAGCCCGTAACTCGAGGGC+TZ,1/46

NOV17l, CG95430-11

| | | | |
|---|---|---|---|
| Protein Sequence | SEQ ID NO: 252 | 340 aa | MW at 35534.6kD |

MGHHHHHHRIWNFLLAIEICTGNINSQDTCRQGHPGIPGNPGHNGLPGRDGRDGAKGDKGDAGEPGRPGSPGK
DGTSGEKGERGADGKVEAKGLKGDQGSRGSPGKHGPKGLAGPMGEKGLRGETGPQGQKGNKGDVGPTGPEGPR
GNIGPLGPTGLPGPMGPIGKPGPKGEAGPTGPQGEPGVRGIRGWKGDRGEKGKIGETLVLPKSAFTVGLTVLS
KFPSSDVPIKFDKILYNEFNHYDTAAGKFTCHIAGVYYFTYHITVFSRNVQVSLVKNGVKILHTKDAYMSSED
QASGGIVLQLKLGDEVWLQVTGGEKFNGLFADEDDDTTFTGFLLFSSP

| | | |
|---|---|---|
| NOV17m, CG95430-12 | SEQ ID NO: 253 | 982 bp |

| | | |
|---|---|---|
| DNA Sequence | ORF Start: at 11 | ORF Stop: TAA at 971 |

CACCAGATCTCACCATCACCACCATCACCAGGACACCTGCAGGCAAGGGCACCCTGGAATCCCTCGGAACCCC
GGTCACAATGGTCTGCCTGGAAGAGATGGACGAGACGGAGCGAAGGGTGACAAAGGCGATGCAGGAGAACCAG
GACGTCCTGGCAGCCCGGGGAAGGATGGGACGAGTGGAGAGAAGGGAGAACGAGGAGCAGATGGAAAAGTTGA
AGCAAAAGGCATCAAAGGTGATCAAGGCTCAAGAGGATCCCCAGGAAAACATGGCCCCAAGCGGCTTGCAGGG
CCCATGGGAGAGAAAGGCCTCCGAGGAGACACTGGGCCTCAGGGGCAGAAGGGGAATAAGGGTGACGTGGGTC
CCACTGGTCCTGAGGGGCCAAGGGGCAACATTGGGCCTTTGGGCCCAACTCGTTTACCGGGCCCCATGGGCCC
TATTGGAAAGCCTGGTCCCAACGGAGAAGCTGGACCCACGGGCCCCCAGGGTGAGCCAGGAGTCCGGGGAATA
AGAGGCTGGAAAGGAGATCGAGGAGAGAAAGGGAAAATCGGTGAGACTCTAGTCTTGCCAAAAAGTGCTTTCA
CTGTGGGGCTCACGGTGCTGAGCAAGTTTCCTTCTTCAGATGTGCCCATTAAATTTGATAAGATCCTGTATAA
CGAATTCAACCATTATGATACAGCAGCGGGGAAATTCACGTGCCACATTGCTGGGGTCTATTACTTCACCTAC
CACATCACTGTTTTCTCCAGGAATGTTCAGGTGTCTTTGGTCAAAAATGGAGTAAPAATACTGCACACCAAAG
ATGCTTACATGAGCTCTGAGGACCAGGCCTCTGGCGGCATTGTCCTGCAGCTGAAGCTCCGGGATGACGTGTG
GCTGCAGGTGACAGGAGGAGAGAAGTTCAATGGCTTGTTTGCTGATGAGGACGATGACACAACTTTCACAGGG
TTCCTTCTGTTCAGCAGCCCGTAACTCGAGGGC+TZ,1/46

NOV17m, CG95430-12

| | | | |
|---|---|---|---|
| Protein Sequence | SEQ ID NO: 254 | 320 aa | MW at 33214.9kD |

HHHHHHQDTCRQGHPGIPGNPGHNGLPGRDGRDGAKGDKGDAGEPGRPGSPGKDGTSGEKGERGADGKVEAKG
IKGDQGSRGSPGKHGPKGLAGPMGEKGLRGETGPQGQKGNKGDVGPTGPEGPRGNICPLGPTGLPGPMGPIGK
PGPKGEAGPTGPQGEPGVRGIRGWKGDRGEKGKIGETLVLPKSAFTVGLTVLSKFPSSDVPIKFDKILYMEFN
HYDTAAGKFTCHIAGVYYFTYHITVFSRNVQVSLVKNGVKILHTKDAYMSSEDQASGGIVLQLKLGDEVWLQV
TGGEKFNGLFADEDDDTTFTGFLLFSSP

| | | |
|---|---|---|
| NOV17n, CG95430-13 | SEQ ID NO: 255 | 982 bp |

| | | |
|---|---|---|
| DNA Sequence | ORF Start: at 11 | ORF Stop: TAA at 971 |

CACCAGATCTCACCATCACCACCATCACCAGGACACCTGCAGGCAAGGGCACCCTGGAATCCCTGGGAACCCC
GGTCACAATGGTCTGCCTGGAAGAGATGGACGAGACGCAGCGAAGGGTGACAAAGGCGATGCAGGAGAACCAG
GACGTCCTGGCAGCCCGGGGAAGGATGGGACGAGTGGAGAGAAGGGAGAACGAGGAGCAGATGGAAAAGTTGA
AGCAAAAGGCATCAAAGGTGATCAAGGCTCAAGAGGATCCCCAGGAAAACATGGCCCCAAGGCGCTTGCAGGG
CCCATGGGAGAGAAAGGCCTCCGAGGAGAGACTGGGCCTCAGGGGCAGAAGGGGAATAAGGGTGACGTGGGTC
CCACTGGTCCTGAGGGGCCAAGGGGCAACATTGGGCCTTTGGGCCCAACTGGTTTACCGGGCCCCATGGGCCC
TATTGGAAAGCCTGGTCCCAAGGGAGAAGCTGGACCCACGGGGCCCCAGGGTGAGCCAGGAGTCCGGCGAATA
AGAGGCTGGAAAGCAGATCGAGGAGAGAAAGGGAAAATCGGTGAGACTCTAGTCTTGCCAAAAAGTGCTTTCA
CTGTCCGGCTCACGGTGCTGAGCAAGTTTCCTTCTTCAGATGTGCCCATTAAATTTGATAACATCCTGTATAA
CGAATTCAACCATTATGATACAGCACCGGGGAAATTCACGTGCCACATTGCTGGGGTCTATTACTTCACCTAC
CACATCACTGTTTTCTCCAGGAATGTTCAGGTGTCTTTGGTCAAAAATGGAGTAAAAATACTGCACACCAAAG
ATGCTTACATGAGCTCTCAGGACCAGGCCTCTGGCGGCATTGTCCTGCAGCTGAAGCTCGGGGATGAGGTGTG
GCTGCAGGTGACAGGAGGAGAGAGGTTCAATGGCTTGTTTGCTGATGAGGACGATGACACAACTTTCACAGGG
TTCCTTCTGTTCAGCAGCCCGTAACTCGAGGGC+TZ,1/46

NOV17n, CG95430-13

| | | | |
|---|---|---|---|
| Protein Sequence | SEQ ID NO: 256 | 320 aa | MW at 33242.9kD |

HHHHHHQDTCRQGHPGIPGNPGHNGLPGRDGRDGAKGDKGDAGEPGRPGSPCKDGTSGEKGERGADGKVEAKG
IKGDQGSRGSPGKHGPKGLAGPMGEKGLRGETGPQGQKGNKGDVGPTGPEGPRGNIGPLCPTGLPGPMGPIGK
PGPKGEAGPTGPQGEPGVRGIRGWKGDRGEKGKIGETLVLPKSAFTVGLTVLSKFPSSDVPIKFDKILYNEFN
HYDTAAGKFTCHIAGVYYFTYHITVFSRNVQVSLVKNGVKILHTKDAYMSSEDQASGGIVLQLKLGDEVWLQV
TGGERFNGLFADEDDDTTFTGFLLFSSP

| | |
|---|---|
| SEQ ID NO: 257 | 818 bp |

| | | |
|---|---|---|
| NOV17o, SNP13379412 of | ORF Start: ATG at 35 | ORF Stop: TGA at 728 |

| | | |
|---|---|---|
| CG95430-01, DNA Sequence | SNP Pos: 50 | SNP Change: C to T |

TCCCTCTTTCAGTTCAGAGTCTGTCATCTGAACCATGAGGATCTGGTGGTTTCTGCTTGCCATTGAAATCTGC
ACAGGGAACATAAACTCACAGGACACCTGCAGGCAAGCGCACCCTGGAATCCCTGGGAACCCCGGTCACAATG
GTCTGCCTGGAAGAGATGGACGAGACGGAGCGAAGGGTGACAAAGGCGATGCAGGTAAGCCTGGTCCCAAAGG
AGAAGCTCGACCCACGGGGCCCCAGGGTGAGCCAGGAGTCCGGGGAATAAGAGGCTGGAAAGGAGATCGAGGA
GAGAAAGGGAAAATCGGTGAGACTCTAGTCTTGCCAAAAAGTGCTTTCACTGTGGGGCTCACGGTGCTGAGCA
AGTTTCCTTCTTCAGATATGCCCATTAAATTTGATAAGATCCTGTATAACGAATTCAACCATTATGATACAGC
AGCGGGGAAATTCACGTGCCACATTGCTGGGGTCTATTACTTCACCTACCACATCACTGTTTTCTCCAGAAAT
GTTCAGGTGTCTTTGGTCAAAAATGGAGTAAAAATACTGCACACCAAAGATGCTTACATGAGCTCTGAGGACC
AGGCCTCTGGCGGCATTGTCCTGCAGCTGAACCTCGGGGATGAGGTGTGGCTGCAGGTGACAGGAGGAGAGAG
GTTCAATGGCTTGTTTGCTGATGAGGACGATGACACAACTTTCACAGGGTTCCTTCTGTTCAGCAGCCCGTGA
CAGAGGAGAGTTTAAAAATCCGCCACACCATCCATCAGAATCAGCTTGGGATGAACTTATTCAGATGGTTTTA
CTTTATTAATTCCTC+TZ,1/46

| | | |
|---|---|---|
| NOV17o, SNP13379412 of | SEQ ID NO: 258 | MW at 24980.0kD |

| | | | |
|---|---|---|---|
| CG95430-01, Protein Sequence | SNP Pos: 6 | 231 aa | SNP Change: Leu to Phe |

MRIWWFLLAIEICTGNINSQDTCRQGHPGIPGNPGHNGLPGRDGRDGAKGDKGDAGKPGPKGEAGPTGPQGEP
GVRGIRGWKGDRGEKGKIGETLVLPKSAFTVGLTVLSKFPSSDMPIKFDKILYNEFNHYDTAAGKFTCHIAGV
YYFTYHITVFSRNVQVSLVKNGVKILHTKDAYMSSEDQASGGIVLQLKLGDEVWLQVTGGERFNGLFADEDDD
TTFTGFLLFSSP

| | |
|---|---|
| SEQ ID NO: 259 | 818 bp |

| | | |
|---|---|---|
| NOV17p, SNP13381828 of | ORF Start: ATG at 35 | ORF Stop: TGA at 728 |

| | | |
|---|---|---|
| CG95430-01, DNA Sequence | SNP Pos: 235 | SNP Change: G to A |

TCCCTCTTTCAGTTCAGAGTCTGTCATCTGAACCATGAGGATCTGGTGGCTTCTGCTTGCCATTGAAATCTGC
ACAGGGAACATAAACTCACAGGACACCTGCAGGCAAGGGCACCCTGGAATCCCTGGGAACCCCGGTCACAATG
GTCTGCCTGGAAGAGATGGACGAGACGGAGCGAAGGCTGACAAAGGCGATGCAGGTAAGCCTGGTCCCAAAGG
AGAAGCTGGACCCACAGGGCCCCAGGGTGAGCCAGGAGTCCGGGGAATAAGAGGCTGGAAAGGAGATCGAGGA
GAGAAAGGGAAAATCGGTGACACTCTAGTCTTGCCAAAAAGTGCTTTCACTGTGGGGCTCACGGTGCTGAGCA
AGTTTCCTTCTTCAGATATGCCCATTAAATTTGATAAGATCCTGTATAACGAATTCAACCATTATGATACAGC
AGCGGGCAAATTCACGTGCCACATTCCTGGGGTCTATTACTTCACCTACCACATCACTGTTTTCTCCAGAAAT
GTTCAGGTGTCTTTGGTCAAAAATGGAGTAAAAATACTGCACACCAAAGATGCTTACATGAGCTCTGAGGACC
AGCCCTCTGGCGGCATTCTCCTGCAGCTGAAGCTCGGGCATGAGGTGTGGCTGCAGGTGACAGGAGGAGAGAG
GTTCAATGGCTTGTTTGCTGATGAGGACGATGACACAACTTTCACAGGGTTCCTTCTGTTCAGCAGCCCGTGA
CAGACGAGAGTTTAAAAATCCGCCACACCATCCATCAGAATCAGCTTGGGATGAACTTATTCAGATGGTTTTA
CTTTATTAATTCCTC+TZ,1/46

| | | |
|---|---|---|
| NOV17p, SNP13381828 of | SEQ ID NO: 260 | MW at 24913.9kD |

| | | | |
|---|---|---|---|
| CG95430-01, Protein Sequence | SNP Pos: 67 | 231 aa | SNP Change: Thr to Thr |

MRIWWLLLAIEICTGNINSQDTCRQGHPGIPGNPGHNGLPGRDGRDGAKGDKGDAGKPGPKGEAGPTGPQGEP
GVRGIRGWKGDRGEKGKIGETLVLPKSAFTVGLTVLSKFPSSDVPIKFDKILYNEFNHYDTAAGKFTCHIAGV
YYFTYHITVFSRNVQVSLVKNGVKILHTKDAYMSSEDQASGGIVLQLKLGDEVWLQVTGGERFNGLFADEDDD
TTFTGFLLFSSP

| | |
|---|---|
| SEQ ID NO: 261 | 818 bp |

| | | |
|---|---|---|
| NOV17q, SNP13379125 of | ORF Start: ATG at 35 | ORF Stop: TGA at 728 |

| | | |
|---|---|---|
| CG95430-01, DNA Sequence | SNP Pos: 383 | SNP Change: A to G |

TCCCTCTTTCAGTTCAGAGTCTGTCATCTGAACCATGAGGATCTGGTGGCTTCTGCTTCCCATTGAAATCTGC
ACAGGCAACATAAACTCACAGGACACCTGCAGGCAAGGGCACCCTGGAATCCCTGGGAACCCCGGTCACAATG
GTCTGCCTGGAAGAGATGGACGAGACGGAGCGAAGGGTGACAAAGGCGATGCAGGTAAGCCTGGTCCCAAAGG
AGAAGCTGGACCCACGGGGCCCCAGGGTGAGCCAGGAGTCCGGGGAATAAGACGCTGGAAAGGAGATCGAGGA
GAGAAAGCGAAAATCGGTGAGACTCTACTCTTGCCAAAAAGTGCTTTCACTGTGGGGCTCACGGTGCTGAGCA
AGTTTCCTTCTTCAGATGTGCCCATTAAATTTGATAAGATCCTGTATAACGAATTCAACCATTATGATACAGC
ACCGGGGAAATTCACGTGCCACATTGCTGGGGTCTATTACTTCACCTACCACATCACTGTTTTCTCCAGAAAT
GTTCAGGTGTCTTTGGTCAAAAATGGAGTAAAAATACTGCACACCAAAGATGCTTACATGAGCTCTGAGGACC
AGGCCTCTGGCGGCATTGTCCTGCAGCTGAAGCTCGGGGATGAGGTGTCGCTGCAGGTGACAGGAGGAGAGAG
GTTCAATGGCTTGTTTGCTGATGAGGACGATGACACAACTTTCACAGGGTTCCTTCTGTTCAGCAGCCCGTGA
CAGAGGAGAGTTTAAAAATCCGCCACACCATCCATCAGAATCAGCTTGGGATGAACTTATTCAGATGGTTTTA
CTTTATTAATTCCTC+TZ,1/46

| | | |
|---|---|---|
| NOV17q, SNP13379125 of | SEQ ID NO: 262 | MW at 24913.9kD |

| | | | |
|---|---|---|---|
| CG95430-01, Protein Sequence | SNP Pos: 117 | 231 aa | SNP Change: Met to Val |

MRIWWLLLAIEICTGNINSQDTCRQGHPGIPGNPGHNGLPGRDGRDGAKGDKGDAGKPGPKGEAGPTGPQGEP
GVRGIRGWKGDRGEKGKIGETLVLPKSAFTVGLTVLSKFPSSDVPIKFDKILYNEFNHYDTAAGKFTCHIAGV
YYFTYHITVFSRNVQVSLVKNGVKILHTKDAYMSSEDQASGGIVLQLKLGDEVWLQVTGGERFNGLFADEDDD
TTFTGFLLFSSP

| | |
|---|---|
| SEQ ID NO: 263 | 818 bp |

| | | |
|---|---|---|
| NOV17r, SNP13381827 of | ORF Start: ATG at 35 | ORF Stop: TGA at 728 |

| | | |
|---|---|---|
| CG95430-01, DNA Sequence | SNP Pos: 650 | SNP Change: G to A |

TCCCTCTTTCAGTTCACAGTCTGTCATCTGAACCATGAGGATCTGGTGGCTTCTGCTTGCCATTGAAATCTGC
ACAGGGAACATAAACTCACAGGACACCTGCAGGCAAGGGCACCCTGGAATCCCTGGGAACCCCGGTCACAATG
GTCTGCCTGGAAGAGATGGACGAGACGGAGCGAAGGGTGACAAAGGCGATGCAGGTAAGCCTGGTCCCAAAGG
AGAAGCTGGACCCACGGGGCCCCAGGGTGAGCCAGGAGTCCGGGGAATAAGAGGCTGGAAAGGACATCGAGGA
GAGAAACCGAAAATCGGTGAGACTCTAGTCTTGCCAAAAAGTGCTTTCACTGTGGGGCTCACCGTGCTGAGCA
AGTTTCCTTCTTCAGATATGCCCATTAAATTTGATAAGATCCTGTATAACGAATTCAACCATTATGATACAGC
AGCGGGGAAATTCACGTGCCACATTGCTGGGGTCTATTACTTCACCTACCACATCACTGTTTTCTCCAGAAAT
GTTCAGGTGTCTTTGGTCAAAAATGGAGTAAAAATACTGCACACCAAAGATGCTTACATGAGCTCTGAGGACC
AGGCCTCTGGCGGCATTGTCCTGCAGCTGAAGCTCGGGGATGAGGTGTGGCTGCAGGTGACAGGAAGAGAGAG
GTTCAATGCCTTGTTTGCTGATGAGCACGATGACACAACTTTCACAGGCTTCCTTCTGTTCAGCAGCCCGTGA
CAGAGGAGAGTTTAAAAATCCGCCACACCATCCATCAGAATCAGCTTGGGATGAACTTATTCAGATGGTTTTA
CTTTATTAATTCCTC+TZ,1/46

| | | |
|---|---|---|
| NOV17r, SNP13381827 of | SEQ ID NO: 264 | MW at 25045.1kD |

| | | | |
|---|---|---|---|
| CG95430-01, Protein Sequence | SNP Pos: 206 | 231 aa | SNP Change: Gly to Arg |

MRIWWLLLAIEICTGNINSQDTCRQGHPGIPGNPGHNGLPGRDGRDGAKGDKGDAGKPGPKGEAGPTGPQGEP
GVRGIRGWKGDRGEKGKIGETLVLPKSAFTVGLTVLSKFPSSDMPIKFDKILYNEFNHYDTAAGKFTCHIAGV
YYFTYHITVFSRNVQVSLVKNGVKILHTKDAYMSSEDQASGGIVLQLKLGDEVWLQVTGRERFNGLFADEDDD
TTFTGFLLFSSP

| | |
|---|---|
| SEQ ID NO: 265 | 818 bp |

| | | |
|---|---|---|
| NOV17s, SNP13381822 of | ORF Start: ATG at 35 | ORF Stop: TGA at 728 |

| | | |
|---|---|---|
| CG95430-01, DNA Sequence | SNP Pos: 687 | SNP Change: A to G |

TCCCTCTTTCAGTTCAGAGTCTGTCATCTGAACCATGAGGATCTGGTGGCTTCTGCTTGCCATTGAAATCTGC
ACAGGGAACATAAACTCACAGGACACCTCCAGGCAAGGGCACCCTGGAATCCCTGGGAACCCCGGTCACAATG
GTCTGCCTGGAAGAGATGGACGAGACGGAGCGAAGGGTGACAAAGGCGATGCAGGTAAGCCTGGTCCCAAAGG
ACAAGCTGGACCCACGGGGCCCCAGGGTGAGCCAGGAGTCCGGGGAATAACAGGCTGGAAAGGAGATCGAGGA
GAGAAAGGGAAAATCGGTGAGACTCTAGTCTTGCCAAAAAGTGCTTTCACTGTGGGGCTCACGGTGCTGAGCA
AGTTTCCTTCTTCAGATATGCCCATTAAATTTGATAAGATCCTGTATAACCAATTCAACCATTATGATACAGC
AGCGGGGAAATTCACGTGCCACATTGCTGGGGTCTATTACTTCACCTACCACATCACTGTTTTCTCCAGAAAT
GTTCAGGTGTCTTTGGTCAAAAATGGAGTAAAAATACTGCACACCAAAGATGCTTACATGAGCTCTGAGGACC
AGGCCTCTGGCGGCATTGTCCTCCAGCTGAAGCTCGGGGATGAGGTGTGGCTGCAGGTGACAGGAGGAGAGAG
GTTCAATGGCTTGTTTGCTGATGAGGACGGTGACACAACTTTCACAGGGTTCCTTCTGTTCAGCAGCCCGTGA
CAGAGGAGAGTTTAAAAATCCGCCACCACCATCCATCAGAATCAGCTTGGATGAACTTATTCAGATGGTTTTA
CTTTATTAATTCCTC+TZ,1/46

| | | |
|---|---|---|
| NOV17s, SNP13381822 of | SEQ ID NO: 266 | MW at 24887.9kD |

| | | | |
|---|---|---|---|
| CG95430-01, Protein Sequence | SNP Pos: 218 | 231 aa | SNP Change: Asp to Gly |

NRIWWLLLAIEICTGNINSQDTCRQGHPGIPGNPCHNGLPGRDGRDGAKGDKCDAGKPGPKGEAGPTGPQGEP
GVRGIRGWKGDRGEKGKIGETLVLPKSAFTVGLTVLSKFPSSDMPIKFDKILYNEFNHYDTAAGKFTCHIAGV
YYFTYHITVFSRNVQVSLVKNGVKILHTKDAYNSSEDQASGGIVLQLKLGDEVWLQVTGGERFNGLFADEDGD
TTFTGFLLFSSP

| | |
|---|---|
| SEQ ID NO: 267 | 818 bp |

| | | |
|---|---|---|
| NOV17t, SNP13381826 of | ORF Start: ATG at 35 | ORF Stop: TGA at 728 |

| | | |
|---|---|---|
| CG95430-01, DNA Sequence | SNP Pos: 717 | SNP Change: T to C |

TCCCTCTTTCAGTTCAGAGTCTGTCATCTGAACCATGAGGATCTGGTGGCTTCTGCTTGCCATTGAAATCTGC
ACAGGGAACATAAACTCACAGGACACCTGCAGGCAACGGCACCCTGGAATCCCTGGGAACCCCGGTCACAATG
GTCTCCCTGGAAGAGATGGACGAGACGGAGCGAAGGGTGACAAAGGCGATGCAGGTAAGCCTGGTCCCAAAGG
AGAAGCTGGACCCACGGGGCCCCAGGGTGAGCCAGGAGTCCGGGGAATAAGAGGCTGGAAAGGAGATCGAGGA
GAGAAAGGGAAAATCGGTGAGACTCTAGTCTTGCCAAAAAGTCCTTTCACTGTGGGGCTCACGGTGCTGAGCA
AGTTTCCTTCTTCAGATATGCCCATTAAATTTGATAAGATCCTGTATAACGAATTCAACCATTATGATACAGC
AGCGGGGAAATTCACGTGCCACATTGCTGGGGTCTATTACTTCACCTACCACATCACTGTTTTCTCCAGAAAT
GTTCAGGTGTCTTTGGTCAAAAATCGAGTAAAAATACTGCACACCAAAGATGCTTACATGAGCTCTGAGGACC
AGGCCTCTGGCGGCATTGTCCTGCAGCTGAAGCTCGGGGATCAGGTGTGGCTGCAGGTGACAGGAGGAGAGAG
GTTCAATGGCTTGTTTGCTGATGAGGACGATGACACAACTTTCACAGGGTTCCTTCTGTCCAGCAGCCCGTGA
CAGAGGAGAGTTTAAAAATCCGCCACACCATCCATCAGAATCAGCTTGGGATGAACTTATTCAGATGGTTTTA
CTTTATTAATTCCTC+TZ,1/46

| | | |
|---|---|---|
| NOV17t, SNP13381826 of | SEQ ID NO: 268 | MW at 24885.9kD |

| | | | |
|---|---|---|---|
| CG95430-01, Protein Sequence | SNP Pos: 228 | 231 aa | SNP Change: Phe to Ser |

MRIWWLLLAIEICTGNINSQDTCRQGHPGIPGNPGHNGLPGRDGRDGAKGDKGDAGKPGPKGEAGPTGPQGEP
GVRGIRGWKGDRGEKGKIGETLVLPKSAFTVGLTVLSKFPSSDMPIKFDKILYNEFNHYDTAAGKFTCHIAGV
YYFTYHITVFSRNVQVSLVKNGVKILHTKDAYMSSEDQASGGIVLQLKLGDEVWLQVTGGERFNGLFADEDDD
TTFTGFLLSSSP+TZ,1/46

[0453] A ClustalW comparison of the above protein sequences yields the following sequence alignment shown in Table 17B.

TABLE 17B
Comparison of the NOV17 protein sequences.

| | |
|---|---|
| NOV17a | --------------------------QDTCRQGHPGIPGNPGHNGLPGRDGRDGAKGDKG |
| NOV17b | -------MRIWWFLLAIEICTGNINSQDTCRQGHPGIPGNPGHNGLSGRDGRDGAKGDKG |
| NOV17c | -------MRIWWLLLAIEICTGNINSQDTCRQGHPGIPGNPGHNGLPGRDGRDGAKGDKG |
| NOV17d | ---TGSTMRIWWFLLAIEICTGNINSQDTCRQGHPGIPGNPGHNGLPGRDGRDGAKGDKG |
| NOV17e | ------------------------------------------------------------ |
| NOV17f | -------MRIWWLLLAIEICTGNINSQDTCRQGHPGIPGNPGHNGLPGRDGRDGAKGDKG |
| NOV17g | -------MRIWWFLLAIEICTGNINSQDTCRQGHPGIPGNPGHNGLSGRDGRDGAKGDKG |
| HOV17h | --------------------------QDTCRQGHPGIPGNPGHNGLPGRDGRDGAKGDKG |
| NOV17i | -------MRIWWFLLAIEICTGNINSQDTCRQGNPGIPGNPGHNGLPGRDGRDGAKGDKG |
| NOV17j | --------------------------QDTCRQGHPGIPGNPGHNGLPGRDGRDGAKGDKG |
| NOV17k | -------MRIWWFLLAIEICTGNINSQDTCRQGHPGIPGNPGHNGLPGRDGRDGAKGDKG |
| NOV17l | MGHHHHHHRIWWFLLAIEICTGNINSQDTCRQGHPGIPGNPGHNGLPGRDGRDGAKCDKG |
| NOV17m | --------------------HHHHHHQDTCRQGHPGIPGNPGHNGLPGRDGRDGAKGDKG |
| NOV17n | --------------------HHHHHHQDTCRQGHPGIPGNPGHNGLPGRDGRDGAKGDKG |
| NOV17a | DAGEPGRPGSPGKDGTSGEKGERGADGKVEAKGIKGDQGSRGSPGKHGPKGLAGPMGEKG |
| NOV17b | DAGEPGRPGSPGKDGTSGEKGERGADGKVEAKGIKGDQGSRGSPGKHGPKGLAGPMGEKG |
| NOV17c | DAGKPG------------------------------------------PKGEAGPTG--- |
| NOV17d | DAGEPGRPGSPGKDGTSGEKGERGADGKVEAKGIKGDQGSRGSPGKHGPKGLAGPMGEKG |
| NOV17e | ------------------------------------------------------------ |
| NOV17f | DAGEPGRPGSPGKDGTSGEKGERGADGKVEAKGIKGDQGSRGSPGKHGPKGLAGPMGEKG |
| NOV17g | DAGEPGRPGSPGKDGTSGEKGERGADGKVEAKGIKGDQGSRGSPGKHGPKGLAGPMGEKG |
| NOV17h | DAGEPGRPGSPGKDGTSGEKGERGADGKVEAKCIKGDQGSRGSPGKHGPKGLAGPMGEKG |
| NOV17i | DAGEPGRPGSPGKDGTSGEKGERGADGKVEAKGIKGDQGSRGSPGKHGPKGLAGPMGEKG |
| NOV17j | DAGEPGRPGSPGKDGTSGEKGERGADGKVEAKGIKGDQGSRGSPGKHGPKGLAGPMGEKG |
| NOV17k | DAGEPGRPGSPGKDGTSGEKGERGADGKVEAKGIKGDQGSRGSPGKHGPKGLAGPMGEKG |
| NOV17l | DAGEPGRPGSPGKDGTSGEKGERGADGKVEAKGIKGDQGSRGSPGKHGPKGLAGPMGEKG |
| NOV17m | DAGEPGRPGSPGKDGTSGEKGERCADGKVEAKGIKGDQGSRGSPGKHGPKGLAGPMGEKG |
| NOV17n | DAGEPGRPGSPGKDGTSGEKGERGADGKVEAKGIKGDQGSRGSPGKHGPKGLAGPMGEKG |
| NOV17a | LRGETGPQGQKGNKGDVGPTGPEGPRGNIGPLGPTGLPGPMGPIGKPGPKGEAGPTGPQG |
| NOV17b | LRGETGPQGQKGNKGDVGPTGPEGPRGNIGPLGPTGLPGPMGPIGKPGPKGEAGPTGPQG |
| NOV17c | ------PQG--------------------------------------------------- |
| NOV17d | LRGETGPQGQKGNKGDVGPTGPEGPRGNIGPLGPTGLPGPMGPIGKPGPKGEAGPTGPQG |
| NOV17e | ------------------------------------------------------------ |
| NOV17f | LRGETGPQGQKGNKGDVGPTGPEGPRGNIGPLGPTGLPGPMGPIGKPGPKGEAGPTGPQG |
| NOV17g | LRGETGPQGQKGNKG--------------------------------------------- |
| NOV17h | LRGETGPQGQKGNKGDVGPTGPEGPRGNIGPLGPTGLPGPMGPIGKPGPKGEAGPTGPQG |
| NOV17i | LRGETGPQGQKGNKGDVGPTGPEGPRGNIGPLGPTGLPGPMGPIGKPGPKGEAGPTGPQG |
| NOV17j | LRGETGPQGQKGNKGDVGPTGPEGPRGNIGPLGPTGLPGPMGPIGKPGPKGEAGPTGPQG |
| NOV17k | LRGETGPQGQKGNKCDVGPTGPEGPRGNIGPLGPTGLPGPMGPIGKPGPKGEAGPTGPQG |
| NOV17l | LRGETGPQGQKGNKGDVGPTGPEGPRGNIGPLGPTGLPGPNGPIGKPGPKGEAGPTGPQG |
| NOV17m | LRGETGPQGQKGNKGDVGPTGPEGPRGNIGPLGPTGLPGPMGPIGKPGPKGEAGPTGPQG |
| NOV17n | LRGETGPQGQKGNKGDVGPTGPEGPRGNIGPLGPTGLPGPMGPIGKPGPKGEAGPTGPQG |
| NOV17a | EPGVRGIRGWKGDRGEKGKIGETLVLPKSAFTVGLTVLSKFPSSDVPIKFDKILYNEFNH |
| NOV17b | EPGVRGIRGWKGDRGEKGKIGETLVLPKSAFTVGLTVLSKFPSSDMPIKFDKILYNEFNH |
| NOV17c | EPGVRGIRGWKGDRGEKGKIGETLVLPKSAFTVGLTVLSKFPSSDMPIKFDKILYNEFNH |
| NOV17d | EPGVRGIRGWKGDRGEKGKIGETLVLPKSAFTVGLTVLSKFPSSDVPIKFDKILYNEFNH |
| NOV17e | -----------------------------AFTVGLTVLSKFPSSDMPIKFDKILYNEFNH |
| NOV17f | EPGVRGIRGWKGDRGEKGKIGETLVLPKSAFTVGLTVLSKFPSSDVPIKFDK-------- |
| NOV17g | EPGVRGIRGWKGDRGEKGKIGETLVLPKSAFTVGLTVLSKFPSSDVPIKFDKILYNEFNH |
| NOV17h | EPGVRGIRGWKGDRGEKGKIGETLVLPKSAFTVGLTVLSKFPSSDVPIKFDKILYNEFNH |
| NOV17i | EPGVRGIRGWKGDRGEKGKIGETLVLPKSAFTVGLTVLSKFPSSDVPIKFDKILYNEFNH |
| NOV17j | EPGVRGIRGWKGDRGEKGKIGETLVLPKSAFTVGLTVLSKFPSSDVPIKFDKILYNEFNH |
| NOV17k | EPGVRGIRGWKGDRGEKGKIGETLVLPKSAFTVGLTVLSKFPSSDVPIKFDKILYNEFNH |
| NOV17l | EPGVRGIRGWKGDRGEKGKIGETLVLPKSAFTVGLTVLSKFPSSDVPIKFDKILYNEFNH |
| NOV17m | EPGVRGIRGWKGDRGEKGKIGETLVLPKSAFTVGLTVLSKFPSSDVPIKFDKILYNEFNH |
| NOV17n | EPGVRGIRGWKGDRGEKGKIGETLVLPKSAFTVGLTVLSKFPSSDVPIKFDKILYNEFNH |
| NOV17a | YDTAAGKFTCHIAGVYYFTYHITVFSRNVQVSLVKNGVKILHTKDAYMSSEDQASGGIVL |
| NOV17b | YDTAAGKFTCHIAGVYYFTYHITVFSRNVQVSLVKNGVKILHTKDAYMSSEDQASGGIVL |
| NOV17c | YDTAAGKPTCHIAGVYYFTYHITVFSRNVQVSLVKNGVKILHTKDAYMSSEDQASGGIVL |
| NOV17d | YDTAAGKFTCHIAGVYYFTYHITVFSRNVQVSLVKNGVKILHTKDAYMSSEDQASGGIVL |
| NOV17e | YDTAAGKFTCHIAGVYYFTYHITVFSRNVQVSLVKNGVKILHTKDAYMSSEDQASGGIVL |
| NOV17f | --------------I-----HITVFSRNVQVSLVKNGVKILHTRDAYVSSEDQASGSIVL |
| NOV17g | YDTAAGKFTCHIAGVYYFTYHIAVFSSNVQVSLVKNGVKILHTKDAYMSSEDQASGGIVL |
| NOV17h | YDTAAGKFTCHIAGVYYFTYHITVFSRNVQVSLVKNGVKILHTKDAYMSSEDQASGGIVL |
| NOV17i | YDTAAGKFTCHIAGVYYFTYHITVFSRNVQVSLVKNGVKILHTKDAYMSSEDQASGGIVL |
| NOV17j | YDTAAGKFTCNIAGVYYFTYHITVFSRNVQVSLVKNGVKILHTKDAYMSSEDQASGGIVL |
| NOV17k | YDTAAGKFTCHIAGVYYFTYHITVFSRNVQVSLVKNGVKILHTKDAYMSSEDQASGGIVL |
| NOV17l | YDTAAGKFTCHIAGVYYFTYHITVFSRNVQVSLVKNGVKILHTKDAYMSSEDQASGGIVL |
| NOV17m | YDTAAGKFTCHIAGVYYFTYHITVFSRNVQVSLVKNGVKILHTKDAYMSSEDQASGGIVL |
| NOV17n | YDTAAGKFTCHIAGVYYFTYHITVFSRNVQVSLVKNGVKILHTKDAYMSSEDQASGGIVL |
| NOV17a | QLKLGDEVWLQVTGGERFNGLFADEDDDTTFTGFLLFSSP |
| NOV17b | QLKLGDEVWLQVTGGERFNGLFADEDDDTTFTGFLLFSSQ |
| NOV17c | QLKLGDEVWLQVTGGERFNGLFADEDDDTTFTGFLLFSSP |
| NOV17d | QLKLGDEVWLQVTGGEKFNGLFADEDDDTTFTGFLLFSSP |
| NOV17e | QLKLGDEVWLQVTGGERFNGLFADEDDDTTFTGFLLFSSP |
| NOV17f | QLKLGDEMWLQVTGGERFNGLFADEDDDTTFTGFLLFSSQ |
| NOV17g | QLKLGDEVWLQVTGGERFNGLFADEDDDTTFTGFLLFSSQ |
| NOV17h | QLKLGDEVWLQVTGGERFNGLFADEDDDTTFTGFLLFSSP |
| NOV17i | QLKLGDEVWLQVTGGEKFNGLFADEDDDTTFTGFLLFSSP |
| NOV17j | QLKLGDEVWLQVTGGERFNGLFADEDDDTTFTGFLLFSSP |
| HOV17k | QLKLGDEVWLQVTGGEKFNGLFADEDDDTTFTGFLLFSSP |
| NOV17l | QLKLGDEVWLQVTGGEKFNGLFADEDDDTTFTGFLLFSSP |
| NOV17m | QLKLGDEVWLQVTGGEKFNGLFADEDDDTTFTGFLLFSSP |
| NOV17n | QLKLGDEVWLQVTGGERFNGLFADEDDDTTFTGFLLFSSP |
| NOV17a | (SEQ ID NO: 230) |
| NOV17b | (SEQ ID NO: 232) |
| NOV17c | (SEQ ID NO: 234) |
| NOV17d | (SEQ ID NO: 236) |
| NOV17e | (SEQ ID NO: 238) |
| NOV17f | (SEQ ID NO: 240) |
| NOV17g | (SEQ ID NO: 242) |
| NOV17h | (SEQ ID NO: 244) |
| NOV17i | (SEQ ID NO: 246) |
| NOV17j | (SEQ ID NO: 248) |
| NOV17k | (SEQ ID NO: 250) |
| NOV17l | (SEQ ID NO: 252) |
| NOV17m | (SEQ ID NO: 254) |
| NOV17n | (SEQ ID NO: 256) |

[0454] Further analysis of the NOV17a protein yielded the following properties shown in Table 17C.

TABLE 17C
Protein Sequence Properties NOV17a

| SignalP analysis: | No Known Signal Sequence Predicted | | | |
|---|---|---|---|---|
| PSORT II | PSG: a new signal peptide prediction method | | | |
| analysis: | N-region: length 5; pos. chg 1; neg. chg 1 | | | |
| | H-region: length 17; peak value 0.39 | | | |
| | PSG score: −4.01 | | | |
| | GvH: von Heijne's method for signal seq. recognition | | | |
| | GvH score (threshold: −2.1): −14.34 | | | |
| | possible cleavage site: between 52 and 53 | | | |
| | >>> Seems to have no N-terminal signal peptide | | | |
| | ALOM: Klein et al's method for TM region allocation | | | |
| | Init position for calculation: 1 | | | |
| | Tentative number of TMS(s) for the threshold 0.5: 0 | | | |
| | number of TMS(s) . . . fixed | | | |
| | PERIPHERAL | Likelihood = 2.17 (at 177) | | |
| | ALOM score: 2.17 (number of TMSs: 0) | | | |
| | MITDISC: discrimination of mitochondrial targeting seq | | | |
| | R content: | 2 | Hyd Moment (75): | 8.45 |
| | Hyd Moment(95): | 12.46 | G content: | 6 |
| | D/E content: | 2 | S/T content: | 1 |

```
Score: −6.71
Gavel: prediction of cleavage sites for mitochondrial preseq
R-2 motif at 15 CRQ|GH
NUCDISC: discrimination of nuclear localization signals
pat4: none
pat7: none
bipartite: none
content of basic residues: 12.4%
NLS Score: −0.47
KDEL: ER retention motif in the C-terminus: none
ER Membrane Retention Signals:
XXRR-like motif in the N-terminus: DTCR
none
SKL: peroxisomal targeting signal in the C-terminus: none
PTS2: 2nd peroxisomal targeting signal: none
VAC: possible vacuolar targeting motif: none
RNA-binding motif: none
Actinin-type actin-binding motif:
type 1: none
type 2: none
NMYR: N-myristoylation pattern: none
Prenylation motif: none
memYQRL: transport motif from cell surface to Golgi: none
Tyrosines in the tail: none
Dileucine motif in the tail: none
checking 63 PROSITE DNA binding motifs: none
checking 71 PROSITE ribosomal protein motifs: none
checking 33 PROSITE prokaryotic DNA binding motifs: none
NNCN: Reinhardt's method for Cytoplasmic/Nuclear discrimination
Prediction: cytoplasmic
Reliability: 76.7
COIL: Lupas's algorithm to detect coiled-coil regions
total: 0 residues
Final Results (k = 9/23):
56.5%: cytoplasmic
21.7%: nuclear
  8.7%: mitochondrial
  4.3%: Golgi
  4.3%: vacuolar
  4.3%: plasma membrane
>> prediction for CG95430-02 is cyt (k = 23)
```

[0455] A search of the NOV17a protein against the Geneseq database, a proprietary database that contains sequences published in patents and patent publication, yielded several homologous proteins shown in Table 17D.

TABLE 17D
Geneseq Results for NOV17a

| | | NOV17a | Identities/ | |
|---|---|---|---|---|
| | | Residues/ | Similarities for | |
| Geneseq | Protein/Organism/Length [Patent #, | Match | the Matched | Expect |
| Identifier | Date] | Residues | Region | Value |
| AAO16580 | Energen-related secreted protein - | 1 . . . 314 | 313/314 (99%) | 0.0 |
| | C2P - Unidentified, 333 aa. | 20 . . . 333 | 314/314 (99%) | |
| | [WO2003009865-A1, 06 FEB. 2003] | | | |
| AAO16571 | C2P secreted protein - Unidentified, | 1 . . . 314 | 313/314 (99%) | 0.0 |
| | 333 aa. [WO2003009861-A1, | 20 . . . 333 | 314/314 (99%) | |
| | 06 FEB. 2003] | | | |
| ABB80582 | Human sbg1033026C1q protein #1 - | 1 . . . 314 | 313/314 (99%) | 0.0 |
| | Homo sapiens, 333 aa. | 20 . . . 333 | 314/314 (99%) | |
| | [WO200222802-A1, 21 MAR. 2002] | | | |
| AAE28184 | Human GMG-3 protein - Homo | 1 . . . 314 | 313/314 (99%) | 0.0 |
| | sapiens, 333 aa. [WO200266505-A2, | 20 . . . 333 | 314/314 (99%) | |
| | 29 AUG. 2002] | | | |
| AAE28185 | Human GMG-4 protein - Homo | 1 . . . 313 | 307/313 (98%) | 0.0 |
| | sapiens, 333 aa. [WO200266505-A2, | 20 . . . 332 | 310/313 (98%) | |
| | 29 AUG. 2002] | | | |

[0456] In a BLAST search of public sequence databases, the NOV17a protein was found to have homology to the proteins shown in the BLASTP data in Table 17E.

TABLE 17E
Public BLASTP Results for NOV17a

| | | NOV17a | | |
|---|---|---|---|---|
| Protein | | Residues/ | Identities/ | |
| Accession | | Match | Similarities for the | Expect |
| Number | Protein/Organism/Length | Residues | Matched Portion | Value |
| Q8IUU4 | Hypothetical protein - Homo | 1 . . . 314 | 314/314 (100%) | 0.0 |
| | sapiens (Human), 333 aa. | 20 . . . 333 | 314/314 (100%) | |
| CAD57042 | Sequence 1 from Patent | 1 . . . 314 | 313/314 (99%) | 0.0 |
| | WO02066505 - Homo sapiens | 20 . . . 333 | 314/314 (99%) | |
| | (Human), 333 aa. | | | |
| CAD57043 | Sequence 3 from Patent | 1 . . . 313 | 307/313 (98%) | 0.0 |
| | WO02066505 - Homo sapiens | 20 . . . 332 | 310/313 (98%) | |
| | (Human), 333 aa. | | | |
| CAD57045 | Sequence 7 from Patent | 1 . . . 313 | 267/313 (85%) | e−164 |
| | WO02066505 - Mus musculus | 20 . . . 329 | 284/313 (90%) | |
| | (Mouse), 330 aa. | | | |
| CAD57046 | Sequence 9 from Patent | 1 . . . 313 | 260/313 (83%) | e−158 |
| | WO02066505 - Mus musculus | 20 . . . 322 | 277/313 (88%) | |
| | (Mouse), 323 aa. | | | |

[0457] PFam analysis predicts that the NOV17a protein contains the domains shown in the Table 17F.

TABLE 17F
Domain Analysis of NOV17a

| | | Identities/ | |
|---|---|---|---|
| | NOV17a | Similarities | Expect |
| Pfam Domain | Match Region | for the Matched Region | Value |
| Collagen | 5 . . . 63 | 29/60 (48%) | 8.8e−11 |
| | | 45/60 (75%) | |
| Collagen | 65 . . . 123 | 25/60 (42%) | 2.2e−07 |
| | | 40/60 (67%) | |
| Collagen | 124 . . . 183 | 28/60 (47%) | 0.00021 |
| | | 38/60 (63%) | |
| C1q | 184 . . . 310 | 58/141 (41%) | 7.2e−42 |
| | | 98/141 (70%) | |

### Example 18

[0458] The NOV18 clone was analyzed, and the nucleotide and encoded polypeptide sequences are shown in Table 18A.

TABLE 18A
NOV18 Sequence Analysis

| | | |
|---|---|---|
| NOV18a, CG97111-01 | SEQ ID NO: 269 | 1019 bp |

| | | |
|---|---|---|
| DNA Sequence | ORF Start: ATG at 54 | ORF Stop: TAG at 531 |

GGTTCCAGGAACTCAGGATCTGCAGTGAGGACCAGACACCACTGATTGCAGGAATGTGTTCCCTCCCCATGGC
AAGATACTACAGAATTAAATATGCAGACCAGAAGCCTCTATACACAAGAGATGGCCAGCTGCTGGTGGGAGAT
CCTGTTGCAGACAACTGCTGTGCAGAGAAGATCTGCATACTTCCTAACAGAGGCTTGGCCCGCACCAAGGTCC
CCATTTTCCTGGGGATCCAGGGAGGGAGCCGCTGCCTGGCATGTGTGGAGACACAAGAGGGGCCTTCCCTACA
GCTGGAGCCATCCACCTTGCCCCCACAGGATGTGAACATTGAGGAACTGTACAAAGGTGGTGAAGAGGCCACA
CGCTTCACCTTCTTCCAGAGCACCTCAGGCTCCGCCTTCAGGCTTGAGGCTGCTGCCTGGCCTGGCTGGTTCC
TGTGTGGCCCGGCAGAGCCCCAGCAGCCAGTACAGCTCACCAAGGAGAGTGAGCCCTCAGCCCGTACCAAGTT
TTACTTTGAACAGAGCTGGTAGGGAGACAGGAAACTGCCTTTTAGCCTTGTGCCCCCAAACCAAGCTCATCCT
GCTCAGGGTCTATGGTAGGCAGAATAATGTCCCCCGAAATATGTCCACATCCTAATCCCAAGATCTGTGCATA
TGTTACCATACATGTCCAAAGAGGTTTTGCAAATGTGATTATGTTAAGGATCTTGAAATGAGGAGACAATCCT
CGGTTATCCTTGTGGGCTCAGTTTAATCACAAGAAGGAGGCAGGAAGGGAGAGTCAGAGAGAGAATGGAAGAT
ACCATGCTTCTAATTTTGAAGATGGAGTGAGGGGCCTTGAGCCAACATATGCAGGTGTTTTTAGAAGGAGGAA
AACCCAAGGGAACGGATTCTCCTCTATAGTCTCCGGAAGGAACACAGCTCTTGACACATGGATTTCAGCTCAG
TGACACCCATTTCAGACTTCTGACCTCCACAACTATAAAATAATAAACTTGTGTTATTGTAAACCTCTGG+TZ,1/46

NOV18a, CG97111-01

| | | | |
|---|---|---|---|
| Protein Sequence | SEQ ID NO: 270 | 159 aa | MW at 17706.9kD |

MCSLPMARYYRIKYADQKALYTRDGQLLVGDPVADNCCAEKICILPNRGLARTKVPIFLGIQGGSRCLACVET
EEGPSLQLEPSTLPPQDVNIEELYKCGEEATRFTFFQSSSGSAFRLEAAAWPGWFLCGPAEPQQPVQLTKESE
PSARTKFYFEQSW

| | | |
|---|---|---|
| NOV18b, CG97111-02 | SEQ ID NO:271 | 499 bp |

| | | |
|---|---|---|
| DNA Sequence | ORF Start: ATG at 16 | ORF Stop: TAG at 472 |

CCACTGATTGCAGGAATGTGTTCCCTCCCCATGGCAAGATACTACATAATTAAATATGCAGACCAGAAGGCTC
TATACACAAGAGATGGCCACCTGCTCGTGGGAGATCCTGTTGCAGACAACTGCTGTGCAGAGAAGATCTGCAT
ACTTCCTAACAGAGGCTTGGCCCGCACCAAGGTCCCCATTTTCCTGGGGATCCAGGGAGGGAGCCGCTGCCTG
GCATGTGTGGACACAGAAGAGGGGCCTTCCCTACAGCTGGAGGATGTGAACATTGAGGAACTGTACAAAGGTG
GTGAAGAGGCCACACGCTTCACCTTCTTCCAOAGCAGCTCAGGCTCCGCCTTCAGGCTTGAGGCTGCTGCCTG
GCCTCGCTGGTTCCTGTGTGGCCCGGCAGAGCCCCAGCAGCCAGTACAGCTCACCAAGGACAGTGAGCCCTCA
GCCCGTACCAAGTTTTACTTTGAACAGAGCTGGTAGGGAGACAGGAAACTGCGTTTTAGCC+TZ,1/46

NOV18b, CG97111-02

| | | | |
|---|---|---|---|
| Protein Sequence | SEQ ID NO: 272 | 152 aa | MW at 16943.1kD |

MCSLPMARYYIIKYADQKALYTRDGQLLVGDPVADNCCAEKICILPNRGLARTKVPIFLGIQGGSRCLACVET
EEGPSLQLEDVNIEELYKGGEEATRFTFFQSSSGSAFRLEAAAWPGWFLCGPAEPQQPVQLTKESEPSARTKF
YFEQSW

| | | |
|---|---|---|
| NOV18c, CG97111-03 | SEQ ID NO: 273 | 483 bp |

| | | |
|---|---|---|
| DNA Sequence | ORF Start: at 3 | ORF Stop: TAG at 465 |

CACTGTCATACTGTTTCAGAATTAAATATGCAGACCAGAAGGCTCTATACACAAGAGATGGCCAGCTGCTGGT
GGGAGATCCTGTTGCAGACAACTGCTGTGCAGAGAAGATCTGCATACTTCCTAACAGAGGCTTGGCCCGCACC
AAGGTCCCCATTTTCCTGGGGATCCAGGGAGGGAGCCGCTGCCTGGCATGTGTGGAGACAGAAGAGGGGCCTT
CCCTACAGCTGGAGCCATCCACCTTGCCCCCACAGGATGTGAACATTGAGCAACTGTACAAAGGTGGTCAAGA
GGCCACACGCTTCACCTTCTTCCAGAGCAGCTCAGGCTCCGCCTTCAGGCTTGAGGCTGCTGCCTGGCCTGGC
TGGTTCCTGTGTGGCCCGGCAGAGCCCCAGCAGCCAGTACAGCTCACCAAGGAGAGTGAGCCCTCAGCCCGTA
CCAAGTTTTACTTTGAACAGAGCTGGTAGGGAGACAGGAAACTGC+TZ,1/46

NOV18c, CG97111-03

| | | | |
|---|---|---|---|
| Protein Sequence | SEQ ID NO: 274 | 154 aa | MW at 17104.2kD |

LSYCFRIKYADQKALYTRDGQLLVGDPVADNCCAEKICILPNRGLARTKVPIFLGIQGGSRCLACVETEEGPS
LQLEPSTLPPQDVNIEELYKGGEEATRFTFFQSSSGSAFRLEAAAWPGWFLCGPAEPQQPVQLTKESEPSART
KFYFEQSW

| | |
|---|---|
| SEQ ID NO: 275 | 1019 bp |

| | | |
|---|---|---|
| NOV18d, SNP13382516 of | ORF Start: ATG at 54 | ORF Stop: TAG at 531 |

| | | |
|---|---|---|
| CG97111-01, DNA Sequence | SNP Pos: 125 | SNP Change: T to C |

GGTTCCAGGAACTCAGCATCTGCAGTGACGACCAGACACCACTGATTGCAGGAATGTGTTCCCTCCCCATGGC
AAGATACTACAGAATTAAATATGCAGACCAGAAGGCTCTATACACAAGAGACGGCCAGCTGCTGGTGGGAGAT
CCTGTTGCAGACAACTGCTGTGCAGAGAAGATCTGCATACTTCCTAACAGAGGCTTGGCCCGCACCAAGGTCC
CCATTTTCCTGGGCATCCAGGGAGGGAGCCGCTGCCTGGCATGTGTGGAGACAGAAGAGGGGCCTTCCCTACA
GCTCGAGCCATCCACCTTGCCCCCACAGGATGTGAACATTGAGGAACTGTACAAAGGTGGTGAAGAGGCCACA
CGCTTCACCTTCTTCCAGAGCAGCTCAGGCTCCGCCTTCAGGCTTGAGGCTGCTGCCTGGCCTGGCTGGTTCC
TGTGTGGCCCGCCAGAGCCCCAGCAGCCAGTACAGCTCACCAAGGAGAGTGAGCCCTCAGCCCGTACCAAGTT
TTACTTTGAACAGAGCTGGTAGGGAGACAGGAAACTGCCTTTTAGCCTTGTGCCCCCAAACCAAGCTCATCCT
GCTCAGGGTCTATGGTAGGCAGAATAATGTCCCCCGAAATATGTCCACATCCTAATCCCAAGATCTGTGCATA
TCTTACCATACATGTCCAAAGAGGTTTTGCAAATGTGATTATGTTAAGGATCTTGAAATGAGGAGACAATCCT
GGGTTATCCTTGTGGGCTCAGTTTAATCACAAGAAGGAGGCAGGAAGGGAGAGTCAGAGAGAGAATGGAAGAT
ACCATGCTTCTAATTTTGAAGATGGAGTGAGCGGCCTTGACCCAACATATGCAGGTGTTTTTAGAAGGAGGAA
AAGCCAAGGGAACGGATTCTCCTCTATAGTCTCCGGAAGGAACACAGCTCTTGACACATGGATTTCAGCTCAG
TCACACCCATTTCAGACTTCTGACCTCCACAACTATAAAATAATAAACTTGTGTTATTGTAAACCTCTGG+TZ,1/46

| | | |
|---|---|---|
| NOV18d, SNP13382516 of | SEQ ID NO: 276 | MW at 17706.9kD |

| | | | |
|---|---|---|---|
| CG97111-01, Protein Sequence | SNP Pos: 24 | 159 aa | SNP Change: Asp to Asp |

MCSLPMARYYRIKYADQKALYTRDGQLLVGDPVADNCCAEKICILPNRGLARTKVPIFLGIQGGSRCLACVET
EEGPSLQLEPSTLPPQDVNIEELYKGGEEATRFTFFQSSSGSAFRLEAAAWPGWFLCGPAEPQQPVQLTKESE
PSARTKFYFEQSW

| | |
|---|---|
| SEQ ID NO: 277 | 1019 bp |

| | | |
|---|---|---|
| NOV18e, SNP13382517 of | ORF Start: ATG at 54 | ORF Stop: TAG at 531 |

| | | |
|---|---|---|
| CG97111-01, DNA Sequence | SNP Pos: 184 | SNP Change: T to C |

GGTTCCAGGAACTCAGGATCTGCAGTGAGGACCAGACACCACTGATTGCAGGAATGTGTTCCCTCCCCATGGC
AAGATACTACAGAATTAAATATGCAGACCAGAAGGCTCTATACACAAGAGATGGCCAGCTGCTGGTGGGAGAT
CCTGTTGCAGACAACTGCTGTGCAGAGAAGATCTGCACACTTCCTAACAGAGGCTTGGCCCGCACCAACGTCC
CCATTTTCCTGGCGATCCAGGCAGGGAGCCGCTGCCTGGCATGTGTGGAGACAGAAGAGGGGCCTTCCCTACA
GCTGGAGCCATCCACCTTGCCCCCACAGGATGTGAACATTGAGGAACTGTACAAAGGTGGTGAAGAGGCCACA
CGCTTCACCTTCTTCCAGAGCAGCTCAGGCTCCGCCTTCAGGCTTGAGGCTGCTGCCTGGCCTGGCTGGTTCC
TGTGTGGCCCGGCAGAGCCCCAGCAGCCAGTACAGCTCACCAAGGAGAGTGAGCCCTCAGCCCGTACCAAGTT
TTACTTTGAACAGAGCTGGTAGGGAGACAGGAAACTGCGTTTTAGCCTTGTGCCCCCAAACCAAGCTCATCCT
GCTCAGGGTCTATGGTAGGCAGAATAATGTCCCCCGAAATATGTCCACATCCTAATCCCAAGATCTGTGCATA
TGTTACCATACATGTCCAAAGAGGTTTTGCAAATGTGATTATGTTAAGGATCTTGAAATCAGGAGACAATCCT
GGGTTATCCTTGTGGGCTCAGTTTAATCACAAGAAGGAGGCAGGAAGGGAGAGTCAGAGAGAGAATGGAAGAT
ACCATGCTTCTAATTTTGAAGATGGAGTGAGGGGCCTTGAGCCAACATATGCAGGTGTTTTTAGAAGGAGGAA
AAGCCAAGGCAACGGATTCTCCTCTATAGTCTCCGGAAGGAACACAGCTCTTGACACATGGATTTCAGCTCAG
TGACACCCATTTCAGACTTCTGACCTCCACAACTATAAAATAATAAACTTGTGTTATTGTAAACCTCTGG+TZ,1/46

| | | |
|---|---|---|
| NOV18e, SNP13382517 of | SEQ ID NO: 278 | MW at 17694.9kD |

| | | | |
|---|---|---|---|
| CG97111-01, Protein Sequence | SNP Pos: 44 | 159 aa | SNP Change: Ile to Thr |

MCSLPMARYYRIKYADQKALYTRDGQLLVGDPVADNCCAEKICTLPNRGLARTKVPIFLGIQGGSRCLACVET
EEGPSLQLEPSTLPPQDVNIEELYKGGEEATRFTFFQSSSGSAFRLEAAAWPGWFLCGPAEPQQPVQLTKESE
PSARTKFYFEQSW

| | |
|---|---|
| SEQ ID NO: 279 | 1019 bp |

| | | |
|---|---|---|
| NOV18f, SNP13382518 of | ORF Start: ATG at 54 | ORF Stop: TAG at 531 |

| | | |
|---|---|---|
| CG97111-01, DNA Sequence | SNP Pos: 205 | SNP Change: C to A |

GGTTCCAGGAACTCACGATCTGCAGTGAGGACCACACACCACTCATTGCAGGAATGTGTTCCCTCCCCATGGC
AAGATACTACAGAATTAAATATGCAGACCAGAAGGCTCTATACACAAGAGATGGCCAGCTGCTGGTCGGAGAT
CCTGTTGCAGACAACTGCTGTGCAGAGAAGATCTGCATACTTCCTAACAGAGGCTTGGACCGCACCAAGCTCC
CCATTTTCCTGCCGATCCAGCGAGGGAGCCGCTGCCTGGCATGTGTGGAGACAGAAGAGGGGCCTTCCCTACA
GCTGGAGCCATCCACCTTGCCCCCACAGGATGTGAACATTGAGGAACTGTACAAAGGTGGTGAAGAGGCCACA
CGCTTCACCTTCTTCCAGAGCAGCTCACGCTCCGCCTTCAGGCTTGACGCTGCTGCCTGGCCTGGCTGGTTCC
TGTGTGGCCCGGCAGAGCCCCAGCAGCCAGTACAGCTCACCAAGGAGAGTGAGCCCTCAGCCCGTACCAAGTT
TTACTTTGAACAGAGCTGGTAGGGAGACAGGAAACTGCGTTTTAGCCTTGTGCCCCCAAACCAAGCTCATCCT
GCTCAGGGTCTATGGTAGGCAGAATAATGTCCCCCGAAATATGTCCACATCCTAATCCCAAGATCTGTGCATA
TGTTACCATACATGTCCAAACAGGTTTTGCAAATGTGATTATGTTAAGGATCTTGAAATGAGGAGACAATCCT
GGGTTATCCTTGTGGGCTCAGTTTAATCACAAGAAGGAGGCAGGAAGGGAGAGTCAGAGAGAGAATGGAAGAT
ACCATGCTTCTATTTTGAAGATGGAGTGAGGGGCCTTGAGCCAACATATGCAGGTGTTTTTAAGAAGGAGGAA
AAGCCAAGGGAACGGATTCTCCTCTATAGTCTCCGGAAGGAACACAGCTCTTGACACATGCATTTCAGCTCAG
TGACACCCATTTCAGACTTCTGACCTCCACAACTATAAAATAATAAACTTGTGTTATTGTAAACCTCTGG+TZ,1/46

| | | |
|---|---|---|
| NOV18f, SNP13382518 of | SEQ ID NO: 280 | MW at 17750.9kD |

| | | | |
|---|---|---|---|
| CG97111-01, Protein Sequence | SNP Pos: 51 | 159 aa | SNP Change: Ala to Asp |

MCSLPMARYYRIKYADQKALYTRDGQLLVGDPVADNCCAEKICILPNRGLDRTKVPIFLGIQGGSRCLACVET
EEGPSLQLEPSTLPPQDVNILEELYKGGEEATRFTFFQSSSGSAFRLEAAAWPGWFLCGPAEPQQPVQLTKSE
PSARTKFYFEQSW

[0459] A ClustalW comparison of the above protein sequences yields the following sequence alignment shown in Table 18B.

TABLE 18B
Comparison of the NOV18 protein sequences.

| | |
|---|---|
| NOV18a | MCSLPMARYYRIKYADQKALYTRDGQLLVGDPVADNCCAEKICILPNRGLARTKVPIFLG |
| NOV18b | MCSLPMARYYIIKYADQKALYTRDGQLLVGDPVADNCCAEKICILPNRGLARTKVPIFLG |
| NOV18c | -----LSYCFRIKYADQKALYTRDGQLLVGDPVADNCCAEKICILPNRGLARTKVPIFLG |
| NOV18a | IQGGSRCLACVETEEGPSLQLEPSTLPPQDVNIEELYKGGEEATRFTFFQSSSGSAFRLE |
| NOV18b | IQGGSRCLACVETEEGPSLQLE-------DVNIEELYKGGEEATRFTFFQSSSGSAFRLE |
| NOV18c | IQGGSRCLACVETEEGPSLQLEPSTLPPQDVNIEELYKGGEEATRFTFFQSSSGSAFRLE |
| NOV18a | AAAWPGWFLCGPAEPQQPVQLTKESEPSARTKFYFEQSW |
| NOV18b | AAAWPGWFLCGPAEPQQPVQLTKESEPSARTKFYFEQSW |
| NOV18c | AAAWPGWFLCGPAEPQQPVQLTKESEPSARTKFYFEQSW |
| NOV18a | (SEQ ID NO: 270) |
| NOV18b | (SEQ ID NO: 272) |
| NOV18c | (SEQ ID NO: 274) |

[0460] Further analysis of the NOV18a protein yielded the following properties shown in Table 18C.

TABLE 18C
Protein Sequence Properties NOV18a

| SignalP | No Known Signal Sequence Predicted | | | |
|---|---|---|---|---|
| analysis: | | | | |
| PSORT II | PSG: a new signal peptide prediction method | | | |
| analysis: | N-region: length 11; pos. chg 2; neg. chg 0 | | | |
| | H-region: length 1; peak value −13.22 | | | |
| | PSG score: −17.62 | | | |
| | GvH: von Heijne's method for signal seq. recognition | | | |
| | GvH score (threshold: −2.1): −5.73 | | | |
| | possible cleavage site: between 39 and 40 | | | |
| | >>> Seems to have no N-terminal signal peptide | | | |
| | ALOM: Klein et al's method for TM region allocation | | | |
| | Init position for calculation: 1 | | | |
| | Tentative number of TMS(s) for the threshold 0.5: 0 | | | |
| | number of TMS(s) . . . fixed | | | |
| | PERIPHERAL | Likelihood = 2.07 (at 55) | | |
| | ALOM score: 2.07 (number of TMSs: 0) | | | |
| | MITDISC: discrimination of mitochondrial targeting seq | | | |
| | R content: | 2 | Hyd Moment(75): | 8.63 |
| | Hyd Moment(95): | 6.96 | G content: | 0 |
| | D/E content: | 1 | S/T content: | 1 |

```
Score: −2.42
Gavel: prediction of cleavage sites for mitochondrial preseq
R-2 motif at 21 YRI|KY
NUCDISC: discrimination of nuclear localization signals
pat 4: none
pat 7: none
bipartite: none
content of basic residues: 10.1%
NLS Score: −0.47
KDEL: ER retention motif in the C-terminus: none
ER Membrane Retention Signals: none
SKL: peroxisomal targeting signal in the C-terminus: none
PTS2: 2nd peroxisomal targeting signal: none
VAC: possible vacuolar targeting motif: found
ILPN at 44
RNA-binding motif: none
Actinin-type actin-binding motif:
type 1: none
type 2: none
NMYR: N-myristoylation pattern: none
Prenylation motif: none
memYQRL: transport motif from cell surface to Golgi: none
Tyrosines in the tail: none
Dileucine motif in the tail: none
checking 63 PROSITE DNA binding motifs: none
checking 71 PROSITE ribosomal protein motifs: none
checking 33 PROSITE prokaryotic DNA binding motifs: none
NNCN: Reinhardt's method for Cytoplasmic/Nuclear discrimination
Prediction: cytoplasmic
Reliability: 55.5
COIL: Lupas's algorithm to detect coiled-coil regions
total: 0 residues
Final Results (k = 9/23):
47.8%: nuclear
39.1%: mitochondrial
  4.3%: vacuolar
  4.3%: vesicles of secretory system
  4.3%: cytoplasmic
>> prediction for CG97111-01 is nuc (k = 23)
```

[0461] A search of the NOV18a protein against the Geneseq database, a proprietary database that contains sequences published in patents and patent publication, yielded several homologous proteins shown in Table 18D.

TABLE 18D
Geneseq Results for NOV18a

| | | NOV18a | Identities/ | |
|---|---|---|---|---|
| | | Residues/ | Similarities for | |
| Geneseq | Protein/Organism/Length [Patent #, | Match | the Matched | Expect |
| Identifier | Date] | Residues | Region | Value |
| ABP52020 | NOVINTRA A homologous amino | 10 . . . 159 | 149/150 (99%) | 6e−86 |
| | acid sequence SEQ ID NO: 63 - Homo | 9 . . . 158 | 150/150 (99%) | |
| | sapiens, 158 aa. [US2002068279-A1, | | | |
| | 06 JUN 2002] | | | |
| ABP51984 | Human IL-1 receptor antagonist | 10 . . . 159 | 149/150 (99%) | 6e−86 |
| | protein NOVINTRA A SEQ ID NO: 8 - | 5 . . . 154 | 150/150 (99%) | |
| | Homo sapiens, 154 aa. | | | |
| | [US2002068279-A1, 06 JUN. 2002] | | | |
| AAB84999 | Human interleukin-1 receptor | 10 . . . 159 | 149/150 (99%) | 6e−86 |
| | antagonist (NOVINTRA A) | 5 . . . 154 | 150/150 (99%) | |
| | polypeptide - Homo sapiens, 154 aa. | | | |
| | [WO200140291-A2, 07 JUN. 2001] | | | |
| AAU98463 | Novel human interleukin-1 related | 1 . . . 159 | 151/159 (94%) | 1e−84 |
| | polypeptide - Homo sapiens, 152 aa. | 1 . . . 152 | 151/159 (94%) | |
| | [WO200250113-A2, 27 JUN. 2002] | | | |
| AAM50219 | Interleukin-1 receptor antagonist | 1 . . . 159 | 151/159 (94%) | 1e−84 |
| | related protein splice variant - Homo | 20 . . . 171 | 151/159 (94%) | |
| | sapiens, 171 aa. [WO200142304-A1, | | | |
| | 14 JUN. 2001] | | | |

[0462] In a BLAST search of public sequence databases, the NOV18a protein was found to have homology to the proteins shown in the BLASTP data in Table 18E.

TABLE 18E
Public BLASTP Results for NOV18a

| | | NOV18a | Identities/ | |
|---|---|---|---|---|
| Protein | | Residues/ | Similarities for | |
| Accession | | Match | the Matched | Expect |
| Number | Protein/Organism/Length | Residues | Portion | Value |
| CAC43507 | Sequence 5 from Patent WO0142304 - | 1 . . . 159 | 151/159 (94%) | 4e−84 |
| | Homo sapiens (Human), 171 aa. | 20 . . . 171 | 151/159 (94%) | |
| Q8WWZ1 | Interleukin 1 family member 10 | 1 . . . 159 | 151/159 (94%) | 4e−84 |
| | (IL-1F10) (Interleukin-1 receptor | 1 . . . 152 | 151/159 (94%) | |
| | antagonist-like FIL1 theta) (Interleukin-1 | | | |
| | theta) (IL-1 theta) (FIL1 theta) | | | |
| | (Interleukin-1 HY2) (IL-1HY2) | | | |
| | (Interleukin-1 receptor antagonist | | | |
| | FKSG75) - Homo sapiens (Human), 152 | | | |
| | aa. | | | |
| CAC21779 | Sequence 3 from Patent WO0071719 - | 1 . . . 159 | 149/159 (93%) | 7e−83 |
| | Homo sapiens (Human), 169 aa | 18 . . . 169 | 149/159 (93%) | |
| | (fragment). | | | |
| CAC21778 | Sequence 1 from Patent WO0071719 - | 1 . . . 159 | 149/159 (93%) | 7e−83 |
| | Homo sapiens (Human), 152 aa. | 1 . . . 152 | 149/159 (93%) | |
| Q8R459 | Interleukin 1 family member 10 | 1 . . . 158 | 123/158 (77%) | 3e−65 |
| | (IL-1F10) - Mus musculus (Mouse), 152 | 1 . . . 151 | 133/158 (83%) | |
| | aa. | | | |

[0463] PFam analysis predicts that the NOV18a protein contains the domains shown in the Table 18F.

TABLE 18F
Domain Analysis of NOV18a

| | | Identities/ | |
|---|---|---|---|
| Pfam | | Similarities | Expect |
| Domain | NOV18a Match Region | for the Matched Region | Value |
| IL1 | 12 . . . 159 | 42/153 (27%) | 2e−16 |
| | | 97/153 (63%) | |

### Example 19

[0464] The NOV19 clone was analyzed, and the nucleotide and encoded polypeptide sequences are shown in Table 19A.

TABLE 19A

NOV19a, pCR2.1-CG10132038.0.67-S540u2,

| | | |
|---|---|---|
| a domain of CG50513-05 | SEQ ID NO: 281 | 1377 bp |

TGGGAACATAATCCTTGGACTGCATGTTCCGTGTCCTGTGGAGGAGGGATTCAGAGACGGAGCTTTGTGTGTG
TAGAGGAATCCATGCATGGAGAGATATTGCAGGTGGAAGAATGGAAGTGCATGTACGCACCCAAACCCAAGGT
TATGCAAACTTGTAATCTGTTTGATTGCCCCAAGTGGATTGCCATGGAGTGGTCTCAGTGCACAGTGACTTGT
GGCCGAGGCTTACGGTACCGGGTTGTTCTGTGTATTAACCACCGCGGAGAGCATGTTGGGGGCTGCAATCCAC
AACTGAACTTACACATCAAAGAAGAATGTGTCATTCCCATCCCGTGTTATAAACCAAAAGAAAAAAGTCCAGT
GGAAGCAAAATTGCCTTGGCTGAAACAAGCACAAGAACTAGAAGAGACCAGAATAGCAACAGAAGAACCAACG
TTCATTCCAGAACCCTGGTCAGCCTGCAGTACCACGTGTGGGCCGGGTGTGCAGGTCCGTGAGGTGAAGTGCC
GTGTGCTCCTCACATTCACGCAGACTGAGACTGAGCTGCCCGAGGAAGAGTGTGAAGGCCCCAAGCTGCCCAC
CGAACGGCCCTGCCTCCTGGAAGCATGTGATGACAGCCCGGCCTCCCGAGAGCTAGACATCCCTCTCCCTGAG
GACAGTGAGACGACTTACGACTGGGAGTACGCTGGGTTCACCCCTTGCACAGCAACATGCGTGGGACGCCATC
AAGAAGCCATAGCAGTGTGCTTACATATCCAGACCCAGCAGACAGTCAATGACAGCTTGTGTGATATGGTCCA
CCGTCCTCCAGCCATGAGCCAGGCCTGTAACACAGACCCCTGTCCCCCCACGTGGCATGTGGGCTCTTGGGGG
CCCTGCTCAGCTACCTGTGGAGTTGGAATTCAGACCCGAGATGTGTACTGCCTGCACCCAGGGGAGACCCCTC
CCCCTCCTGAGGAGTGCCGAGATGAAAAGCCCCATGCTTTACAAGCATGCAATCAGTTTGACTGCCCTCCTGG
CTGGCACATTGAAGAATGGCAGCAGTGTTCCAGGACTTGTGGCGGGGGAACTCAGAACAGAAGAGTCACCTGT
CGGCAGCTGCTAACGGATGGCAGCTTTTTGAATCTCTCAGATGAATTGTGCCAAGGACCCAAGGCATCGTCTC
ACAAGTCCTGTGCCAGGACAGACTGTCCTCCACATTTAGCTGTGGGAGACTGGTCGAAGTGTTCTGTCAGTTG
TGGTGTTGGAATCCAGAGAAGAAAGCAGGTGTGTCAAAGGCTGGCAGCCAAAGGTCGGCGCATCCCCCTCAGT
GAGATGATGTGCAGGGATCTACCAGGGCTCCCTCTTGTAAGATCTTGCCAGATCCCTGAGTGC

NOV18f, SNP13382518 of

| | | |
|---|---|---|
| CG97111-01, Protein Sequence | SEQ ID NO: 282 | 458 aa |

EHWPWTACSVSCGGGTQRRSFVCVEESMHGEILQVEEWKCMYAPKPKVMQTCNLFDCPKWIAMEWSQCTVTCG
RGLRYRVVLCINHRGEHVGGCNPQLKLHIKEECVIPIPCYKPKEKSPVEAKLPWLKQAQELEETRIATEEPTF
IPEPWSACSTTCGPGVQVREVKCRVLLTFTQTETELPEEECEGPKLPTERPCLLEACDESPASRELDIPLPED
SETTYDWEYAGFTPCTATCVGCHQEAIAVCLHIQTQQTVNDSLCDMVHRPPAMSQACNTEPCPPRWHVGSWGP
CSATCGVGIQTRDVYCLHPGETPAPPEECRDEKPHALQACNQFDCPPGWHIEEWQQCSRTCGGGTQNRRVTCR
QLLTDGSFLNLSDELCQGPKASSHKSCARTDCPPHLAVCDWSKCSVSCGVGIQRRKQVCQRLAAKGRRIPLSE
MMCRDLPGLPLVRSCQMPEC

### Example B

### Sequencing Methodology and Identification of NOVX Clones

[0465] 1. GeneCalling™ Technology: This is a proprietary method of performing differential gene expression profiling between two or more samples developed at CuraGen and described by Shimkets, et al., “Gene expression analysis by transcript profiling coupled to a gene database query” Nature Biotechnology 17:198-803 (1999). cDNA was derived from various human samples representing multiple tissue types, normal and diseased states, physiological states, and developmental states from different donors. Samples were obtained as whole tissue, primary cells or tissue cultured primary cells or cell lines. Cells and cell lines may have been treated with biological or chemical agents that regulate gene expression, for example, growth factors, chemokines or steroids. The cDNA thus derived was then digested with up to as many as 120 pairs of restriction enzymes and pairs of linker-adaptors specific for each pair of restriction enzymes were ligated to the appropriate end. The restriction digestion generates a mixture of unique cDNA gene fragments. Limited PCR amplification is performed with primers homologous to the linker adapter sequence where one primer is biotinylated and the other is fluorescently labeled. The doubly labeled material is isolated and the fluorescently labeled single strand is resolved by capillary gel electrophoresis. A computer algorithm compares the electropherograms from an experimental and control group for each of the restriction digestions. This and additional sequence-derived information is used to predict the identity of each differentially expressed gene fragment using a variety of genetic databases. The identity of the gene fragment is confirmed by additional, gene-specific competitive PCR or by isolation and sequencing of the gene fragment.

[0466] 2. SeqCalling™ Technology: cDNA was derived from various human samples representing multiple tissue types, normal and diseased states, physiological states, and developmental states from different donors. Samples were obtained as whole tissue, primary cells or tissue cultured primary cells or cell lines. Cells and cell lines may have been treated with biological or chemical agents that regulate gene expression, for example, growth factors, chemokines or steroids. The cDNA thus derived was then sequenced using CuraGen's proprietary SeqCalling technology. Sequence traces were evaluated manually and edited for corrections if appropriate. cDNA sequences from all samples were assembled together, sometimes including public human sequences, using bioinformatic programs to produce a consensus sequence for each assembly. Each assembly is included in CuraGen Corporation's database. Sequences were included as components for assembly when the extent of identity with another component was at least 95% over 50 bp. Each assembly represents a gene or portion thereof and includes information on variants, such as splice forms single nucleotide polymorphisms (SNPs), insertions, deletions and other sequence variations.

[0467] 3. PathCalling™ Technology: The NOVX nucleic acid sequences are derived by laboratory screening of cDNA library by the two-hybrid approach. cDNA fragments covering either the full length of the DNA sequence, or part of the sequence, or both, are sequenced. In silico prediction was based on sequences available in CuraGen Corporation's proprietary sequence databases or in the public human sequence databases, and provided either the full length DNA sequence, or some portion thereof. The laboratory screening was performed using the methods summarized below:

[0468] cDNA libraries were derived from various human samples representing multiple tissue types, normal and diseased states, physiological states, and developmental states from different donors. Samples were obtained as whole tissue, primary cells or tissue cultured primary cells or cell lines. Cells and cell lines may have been treated with biological or chemical agents that regulate gene expression, for example, growth factors, chemokines or steroids. The cDNA thus derived was then directionally cloned into the appropriate two-hybrid vector (Ga14-activation domain (Ga14-AD) fusion). Such cDNA libraries as well as commercially available cDNA libraries from Clontech (Palo Alto, Calif.) were then transferred from E. coli into a CuraGen Corporation proprietary yeast strain (disclosed in U.S. Pat. Nos. 6,057,101 and 6,083,693, incorporated herein by reference in their entireties).

[0469] Ga14-binding domain (Ga14-BD) fusions of a CuraGen Corporation proprietary library of human sequences was used to screen multiple Ga14-AD fusion cDNA libraries resulting in the selection of yeast hybrid diploids in each of which the Ga14-AD fusion contains an individual cDNA. Each sample was amplified using the polymerase chain reaction (PCR) using non-specific primers at the cDNA insert boundaries. Such PCR product was sequenced; sequence traces were evaluated manually and edited for corrections if appropriate. cDNA sequences from all samples were assembled together, sometimes including public human sequences, using bioinformatic programs to produce a consensus sequence for each assembly. Each assembly is included in CuraGen Corporation's database. Sequences were included as components for assembly when the extent of identity with another component was at least 95% over 50 bp. Each assembly represents a gene or portion thereof and includes information on variants, such as splice forms single nucleotide polymorphisms (SNPs), insertions, deletions and other sequence variations.

[0470] Physical clone: the, cDNA fragment derived by the screening procedure, covering the entire open reading frame is, as a recombinant DNA, cloned into pACT2 plasmid (Clontech) used to make the cDNA library. The recombinant plasmid is inserted into the host and selected by the yeast hybrid diploid generated during the screening procedure by the mating of both CuraGen Corporation proprietary yeast strains N106′ and YULH (U.S. Pat. Nos. 6,057,101 and 6,083,693).

[0471] 4. RACE: Techniques based on the polymerase chain reaction such as rapid amplification of cDNA ends (RACE), were used to isolate or complete the predicted sequence of the cDNA of the invention. Usually multiple clones were sequenced from one or more human samples to derive the sequences for fragments. Various human tissue samples from different donors were used for the RACE reaction. The sequences derived from these procedures were included in the SeqCalling Assembly process described in preceding paragraphs.

[0472] 5. Exon Linking: The NOVX target sequences identified in the present invention were subjected to the exon linking process to confirm the sequence. PCR primers were designed by starting at the most upstream sequence available, for the forward primer, and at the most downstream sequence available for the reverse primer. In each case, the sequence was examined, walking inward from the respective termini toward the coding sequence, until a suitable sequence that is either unique or highly selective was encountered, or, in the case of the reverse primer, until the stop codon was reached. Such primers were designed based on in silico predictions for the full length cDNA, part (one or more exons) of the DNA or protein sequence of the target sequence, or by translated homology of the predicted exons to closely related human sequences from other species. These primers were then employed in PCR amplification based on the following pool of human cDNAs: adrenal gland, bone marrow, brain—amygdala, brain—cerebellum, brain—hippocampus, brain—substantia nigra, brain—thalamus, brain—whole, fetal brain, fetal kidney, fetal liver, fetal lung, heart, kidney, lymphoma—Raji, mammary gland, pancreas, pituitary gland, placenta, prostate, salivary gland, skeletal muscle, small intestine, spinal cord, spleen, stomach, testis, thyroid, trachea, uterus. Usually the resulting amplicons were gel purified, cloned and sequenced to high redundancy. The PCR product derived from exon linking was cloned into the pCR2.1 vector from Invitrogen. The resulting bacterial clone has an insert covering the entire open reading frame cloned into the pCR2.1 vector. The resulting sequences from all clones were assembled with themselves, with other fragments in CuraGen Corporation's database and with public ESTs. Fragments and ESTs were included as components for an assembly when the extent of their identity with another component of the assembly was at least 95% over 50 bp. In addition, sequence traces were evaluated manually and edited for corrections if appropriate. These procedures provide the sequence reported herein.

[0473] 6. Physical Clone: Exons were predicted by homology and the intron/exon boundaries were determined using standard genetic rules. Exons were further selected and refined by means of similarity determination using multiple BLAST (for example, tBlastN, BlastX, and BlastN) searches, and, in some instances, GeneScan and Grail. Expressed sequences from both public and proprietary databases were also added when available to further define and complete the gene sequence. The DNA sequence was then manually corrected for apparent inconsistencies thereby obtaining the sequences encoding the full-length protein.

[0474] The PCR product derived by exon linking, covering the entire open reading frame, was cloned into the pCR2.1 vector from Invitrogen to provide clones used for expression and screening purposes.

### Example C

### Quantitative Expression Analysis of Clones in Various Cells and Tissues

[0475] The quantitative expression of various NOV genes was assessed using microtiter plates containing RNA samples from a variety of normal and pathology-derived cells, cell lines and tissues using real time quantitative PCR (RTQ-PCR) performed on an Applied Biosystems (Foster City, Calif.) ABI PRISM® 7700 or an ABI PRISM® 7900 HT Sequence Detection System.

[0476] RNA integrity of all samples was determined by visual assessment of agarose gel electropherograms using 28S and 18S ribosomal RNA staining intensity ratio as a guide (2:1 to 2.5:1 28s:18s) and the absence of low molecular weight RNAs (degradation products). Control samples to detect genomic DNA contamination included RTQ-PCR reactions run in the absence of reverse transcriptase using probe and primer sets designed to amplify across the span of a single exon.

[0477] RNA samples were normalized in reference to nucleic acids encoding constitutively expressed genes (i.e., β-actin and GAPDH). Alternatively, non-normalized RNA samples were converted to single strand cDNA (sscDNA) using Superscript II (Invitrogen Corporation, Carlsbad, Calif., Catalog No. 18064-147) and random hexamers according to the manufacturer's instructions. Reactions containing up to 10 μg of total RNA in a volume of 20 μl or were scaled up to contain 50 μg of total RNA in a volume of 100 μl and were incubated for 60 minutes at 42° C. sscDNA samples were then normalized in reference to nucleic acids as described above.

[0478] Probes and primers were designed according to Applied Biosystems Primer Express Software package (version I for Apple Computer's Macintosh Power PC) or a similar algorithm using the target sequence as input. Default reaction condition settings and the following parameters were set before selecting primers: 250 nM primer concentration; 58°-60° C. primer melting temperature (Tₘ) range; 59° C. primer optimal Tm; 2° C. maximum primer difference (if probe does not have 5′ G, probe Tₘ must be 10° C. greater than primer Tₘ; and 75 bp to 100 bp amplicon size. The selected probes and primers were synthesized by Synthegen (Houston, Tex.). Probes were double purified by HPLC to remove uncoupled dye and evaluated by mass spectroscopy to verify coupling of reporter and quencher dyes to the 5′ and 3′ ends of the probe, respectively. Their final concentrations were: 900 nM forward and reverse primers, and 200 nM probe.

[0479] Normalized RNA was spotted in individual wells of a 96 or 384-well PCR plate (Applied Biosystems, Foster City, Calif.). PCR cocktails included a single gene-specific probe and primers set or two multiplexed probe and primers sets. PCR reactions were done using TaqMan® One-Step RT-PCR Master Mix (Applied Biosystems, Catalog No. 4313803) following manufacturer's instructions. Reverse transcription was performed at 48° C. for 30 minutes followed by amplification/PCR cycles: 95° C. 10 min, then 40 cycles at 95° C. for 15 seconds, followed by 60° C. for 1 minute. Results were recorded as CT values (cycle at which a given sample crosses a threshold level of fluorescence) and plotted using a log scale, with the difference in RNA concentration between a given sample and the sample with the lowest CT value being represented as 2 to the power of delta CT. The percent relative expression was the reciprocal of the RNA difference multiplied by 100. CT values below 28 indicate high expression, between 28 and 32 indicate moderate expression, between 32 and 35 indicate low expression and above 35 reflect levels of expression that were too low to be measured reliably.

[0480] Normalized sscDNA was analyzed by RTQ-PCR using 1×TaqMan® Universal Master mix (Applied Biosystems; catalog No. 4324020), following the manufacturer's instructions. PCR amplification and analysis were done as described above.

[0481] Panels 1, 1.1, 1.2, and 1.3D

[0482] Panels 1, 1. 1, 1.2 and 1 .3D included 2 control wells (genomic DNA control and chemistry control) and 94 wells of cDNA samples from cultured cell lines and primary normal tissues. Cell lines were derived from carcinomas (ca) including: lung, small cell (s cell var), non small cell (non-s or non-sm); breast; melanoma; colon; prostate; glioma (glio), astrocytoma (astro) and neuroblastoma (neuro); squamous cell (squam); ovarian; liver; renal; gastric and pancreatic from the American Type Culture Collection (ATCC, Bethesda, Md.). Normal tissues were obtained from individual adults or fetuses and included: adult and fetal skeletal muscle, adult and fetal heart, adult and fetal kidney, adult and fetal liver, adult and fetal lung, brain, spleen, bone marrow, lymph node, pancreas, salivary gland, pituitary gland, adrenal gland, spinal cord, thymus, stomach, small intestine, colon, bladder, trachea, breast, ovary, uterus, placenta, prostate, testis and adipose. The following abbreviations are used in reporting the results: metastasis (met); pleural effusion (pl. eff or pl effusion) and * indicates established from metastasis.

[0483] General_Screening_Panel_v1.4, v1.5, v1.6 and v1.7

[0484] Panels 1.4, 1.5, 1.6 and 1.7 were as described for Panels 1, 1.1, 1.2 and 1.3D, above except that normal tissue samples were pooled from 2 to 5 different adults or fetuses.

[0485] Panels 2D, 2.2, 2.3, and 2.4

[0486] Panels 2D, 2.2, 2.3 and 2.4 included 2 control wells and 94 wells containing RNA or cDNA from human surgical specimens procured through the National Cancer Institute's Cooperative Human Tissue Network (CHTN) or the National Disease Research Initiative (NDRI), Ardais (Lexington, Mass.) or Clinomics BioSciences (Frederick, Md.). Tissues included human malignancies and in some cases matched adjacent normal tissue (NAT). Information regarding histopathological assessment of tumor differentiation grade as well as the clinical stage of the patient from which samples were obtained was generally available. Normal tissue RNA and cDNA samples were purchased from various commercial sources such as Clontech (Palo Alto, Calif.), Research Genetics and Invitrogen (Carlsbad, Calif.).

[0487] HASS Panel v1.0

[0488] The HASS Panel v1.0 included 93 cDNA samples and two controls including: 81 samples of cultured human cancer cell lines subjected to serum starvation, acidosis and anoxia according to established procedures for various lengths of time; 3 human primary cells; 9 malignant brain cancers (4 medulloblastomas and 5 glioblastomas); and 2 controls. Cancer cell lines (ATCC) were cultured using recommended conditions and included: breast, prostate, bladder, pancreatic and CNS. Primary human cells were obtained from Clonetics (Walkersville, Md.). Malignant brain samples were gifts from the Henry Ford Cancer Center.

[0489] ARDAIS Panel v1.0 and v1.1

[0490] The ARDAIS Panel v1.0 and v1.1 included 2 controls and 22 test samples including: human lung adenocarcinomas, lung squamous cell carcinomas, and in some cases matched adjacent normal tissues (NAT) obtained from Ardais (Lexington, Mass.). Unmatched malignant and non-malignant RNA samples from lungs with gross histopathological assessment of tumor differentiation grade and stage and clinical state of the patient were obtained from Ardais.

[0491] ARDAIS Prostate v1.0

[0492] ARDAIS Prostate v1.0 panel included 2 controls and 68 test samples of human prostate malignancies and in some cases matched adjacent normal tissues (NAT) obtained from Ardais (Lexington, Mass.). RNA from unmatched malignant and non-malignant prostate samples with gross histopathological assessment of tumor differentiation grade and stage and clinical state of the patient were also obtained from Ardais.

[0493] ARDAIS Kidney v1.0

[0494] ARDAIS Kidney v1.0 panel included 2 control wells and 44 test samples of human renal cell carcinoma and in some cases matched adjacent normal tissue (NAT) obtained from Ardais (Lexington, Mass.). RNA from unmatched renal cell carcinoma and normal tissue with gross histopathological assessment of tumor differentiation grade and stage and clinical state of the patient were also obtained from Ardais.

[0495] ARDAIS Breast v1.0

[0496] ARDAIS Breast v1.0 panel included 2 control wells and 71 test samples of human breast malignancies and in some cases matched adjacent normal tissue (NAT) obtained from Ardais (Lexington, Mass.). RNA from unmatched malignant and non-malignant breast samples with gross histopathological assessment of tumor differentiation grade and stage and clinical state of the patient were also obtained from Ardais.

[0497] Panels 3D, 3.1 and 3.2

[0498] Panels 3D, 3.1, and 3.2 included two controls, 92 cDNA samples of cultured human cancer cell lines and 2 samples of human primary cerebellum. Cell lines (ATCC, National Cancer Institute (NCI), German tumor cell bank) were cultured as recommended and were derived from: squamous cell carcinoma of the tongue, melanoma, sarcoma, leukemia, lymphoma, and epidermoid, bladder, pancreas, kidney, breast, prostate, ovary, uterus, cervix, stomach, colon, lung and CNS carcinomas.

[0499] Panels 4D, 4R, and 4.1D

[0500] Panels 4D, 4R, and 4.1D included 2 control wells and 94 test samples of RNA (Panel 4R) or cDNA (Panels 4D and 4.1D) from human cell lines or tissues related to inflammatory conditions. Controls included total RNA from normal tissues such as colon, lung (Stratagene, La Jolla, Calif.), thymus and kidney (Clontech, Palo Alto, Calif.). Total RNA from cirrhotic and lupus kidney was obtained from BioChain Institute, Inc., (Hayward, Calif.). Crohn's intestinal and ulcerative colitis samples were obtained from the National Disease Research Interchange (NDRI, Philadelphia, Pa.). Cells purchased from Clonetics (Walkersville, Md.) included: astrocytes, lung fibroblasts, dermal fibroblasts, coronary artery smooth muscle cells, small airway epithelium, bronchial epithelium, microvascular dermal endothelial cells, microvascular lung endothelial cells, human pulmonary aortic endothelial cells, and human umbilical vein endothelial. These primary cell types were activated by incubating with various cytokines (IL-1 beta ˜1-5 ng/ml, TNF alpha ˜5-10 ng/ml, IFN gamma ˜20-50 ng/ml, IL-4˜5-10 ng/ml, IL-9˜5-10 ng/ml, IL-13 5-10 ng/ml) or combinations of cytokines as indicated. Starved endothelial cells were cultured in the basal media (Clonetics, Walkersville, Md.) with 0.1% serum.

[0501] Mononuclear cells were prepared from blood donations using Ficoll. LAK cells were cultured in culture media [DMEM, 5% FCS (flyclone, Logan, Utah), 100 μM non essential amino acids (Gibco/Life Technologies, Rockville, Md.), 1 mM sodium pyruvate (Gibco), mercaptoethanol 5.5×10⁻⁵ M (Gibco), and 10 mM Hepes (Gibco)] and interleukin 2 for 4-6 days. Cells were activated with 10-20 ng/ml PMA and 1-2 μg/ml ionomycin, 5-10 ng/ml IL-12, 20-50 ng/ml IFN gamma or 5-10 ng/ml IL-18 for 6 hours. In some cases, mononuclear cells were cultured for 4-5 days in culture media with ˜5 μg/ml PHA (phytohemagglutinin) or PWM (pokeweed mitogen; Sigma-Aldrich Corp., St. Louis, Mo.). Samples were taken at 24, 48 and 72 hours for RNA preparation. MLR (mixed lymphocyte reaction) samples were obtained by taking blood from two donors, isolating the mononuclear cells using Ficoll and mixing them 1:1 at a final concentration of ˜2×10⁶ cells/ml in culture media. The MLR samples were taken at various time points from 1-7 days for RNA preparation.

[0502] Monocytes were isolated from mononuclear cells using CD14 Miltenyi Beads, +ve VS selection columns and a Vario Magnet (Miltenyi Biotec, Auburn, Calif.) according to the manufacturer's instructions. Monocytes were differentiated into dendritic cells by culturing in culture media with 50 ng/ml GMCSF and 5 ng/mI IL-4 for 5-7 days. Macrophages were prepared by culturing monocytes for 5-7 days in culture media with ˜50 ng/ml 10% type AB Human Serum (Life technologies, Rockville, Md.) or MCSF (Macrophage colony stimulating factor; R&D, Minneapolis, Minn.). Monocytes, macropbages and dendritic cells were stimulated for 6 or 12-14 hours with 100 ng/ml lipopolysaccharide (LPS). Dendritic cells were also stimulated with 10 μg/ml anti-CD40 monoclonal antibody (Pharmingen, San Diego, Calif.) for 6 or 12-14 hours.

[0503] CD4+ lymphocytes, CD8+ lymphocytes and NK cells were also isolated from mononuclear cells using CD4, CD8 and CD56 Miltenyi beads, positive VS selection columns and a Vario Magnet (Miltenyi Biotec, Auburn, Calif.) according to the manufacturer's instructions. CD45+RA and CD45+RO CD4+ lymphocytes were isolated by depleting mononuclear cells of CD8+, CD56+, CD14+ and CD19+ cells using CD8, CD56, CD14 and CD19 Miltenyi beads and positive selection. CD45RO Miltenyi beads were then used to separate the CD45+RO CD4+ lymphocytes from CD45+RA CD4+ lymphocytes. CD45+RA CD4+, CD45+RO CD4 + and CD8+ lymphocytes were cultured in culture media at 10⁶ cells/ml in culture plates precoated overnight with 0.5 μg/ml anti-CD28 (Pharmingen, San Diego, Calif.) and 3 μg/ml anti-CD3 (OKT3, ATCC) in PBS. After 6 and 24 hours, the cells were harvested for RNA preparation. To prepare chronically activated CD8+ lymphocytes, isolated CD8+lymphocytes were activated for 4 days on anti-CD28, anti-CD3 coated plates and then harvested and expanded in culture media with IL-2 (1 ng/ml). These CD8+ cells were activated again with plate bound anti-CD3 and anti-CD28 for 4 days and expanded as described above. RNA was isolated 6 and 24 hours after the second activation and after 4 days of the second expansion culture. Isolated NK cells were cultured in culture media with 1 ng/ml IL-2 for 4-6 days before RNA was prepared.

[0504] B cells were prepared from minced and sieved tonsil tissue (NDRI). Tonsil cells were pelleted and resupended at 10⁶ cells/ml in culture media. Cells were activated using 5 μg/ml PWM (Sigma-Aldrich Corp., St. Louis, Mo.) or ˜10 μg/ml anti-CD40 (Pharmingen, San Diego, Calif.) and 5-10 ng/ml IL-4. Cells were harvested for RNA preparation after 24, 48 and 72 hours.

[0505] To prepare primary and secondary Th1/Th2 and Tr1 cells, umbilical cord blood CD4+ lymphocytes (Poietic Systems, German Town, Md.) were cultured at 10⁵⁻10⁶ cells/ml in culture media with IL-2 (4 ng/ml) in 6-well Falcon plates (precoated overnight with 10 μg/ml anti-CD28 (Pharmingen) and 2 μg/ml anti-CD3 (OKT3; ATCC) then washed twice with PBS).

[0506] To stimulate Th1 phenotype differentiation, IL-12 (5 ng/ml) and anti-IL4 (1 μg/ml) were used; for Th2 phenotype differentiation, IL-4 (5 ng/ml) and anti-IFN gamma (1 μg/ml) were used; and for Tr1 phenotype differentiation, IL-10 (5 ng/ml) was used. After 4-5 days, the activated Th1, Th2 and Tr1 lymphocytes were washed once with DMEM and expanded for 4-7 days in culture media with IL-2 (1 ng/ml). Activated Th1, Th2 and Tr1 lymphocytes were re-stimulated for 5 days with anti-CD28/CD3 and cytokines as described above with the addition of anti-CD95L (1 μg/ml) to prevent apoptosis. After 4-5 days, the Th1, Th2 and Tr1 lymphocytes were washed and expanded in culture media with IL-2 for 4-7 days. Activated Th1 and Th2 lymphocytes were maintained for a maximum of three cycles. RNA was prepared from primary and secondary Th1, Th2 and Tr1 after 6 and 24 hours following the second and third activations with plate-bound anti-CD3 and anti-CD28 mAbs and 4 days into the second and third expansion cultures.

[0507] Leukocyte cells lines Ramos, EOL-1, KU-812 were obtained from the ATCC. EOL-1 cells were further differentiated by culturing in culture media at 5×10⁵ cells/ml with 0.1 mM dbcAMP for 8 days, changing the media every 3 days and adjusting the cell concentration to 5×10⁵ cells/ml. RNA was prepared from resting cells or cells activated with PMA (10 ng/ml) and ionomycin (1 μg/ml) for 6 and 14 hours. RNA was prepared from resting CCD 1106 keratinocyte cell line (ATCC) or from cells activated with 5 ng/ml TNF alpha and 1 ng/ml IL-1 beta. RNA was prepared from resting NCI-H292, airway epithelial tumor cell line (ATCC) or from cells activated for 6 and 14 hours in culture media with 5 ng/ml IL-4, 5 ng/ml IL-9, 5 ng/ml IL-13, and 25 ng/ml IFN gamma.

[0508] RNA was prepared by lysing approximately 10⁷ cells/ml using Trizol (Gibco BRL) then adding 1/10 volume of bromochloropropane (Molecular Research Corporation, Cincinnati, Ohio), vortexing, incubating for 10 minutes at room temperature and then spinning at 14,000 rpm in a Sorvall SS34 rotor. The aqueous phase was placed in a 15 ml Falcon Tube and an equal volume of isopropanol was added and left at −20° C. overnight. The precipitated RNA was spun down at 9,000 rpm for 15 min and washed in 70% ethanol. The pellet was redissolved in 300 μl of RNAse-free water with 35 μl buffer (Promega, Madison, Wis.) 5 μl DTT, 7 μl RNA sin and 8 μl DNAse and incubated at 37° C. for 30 minutes to remove contaminating genomic DNA, extracted once with phenol chloroform and re-precipitated with 1/10 volume of 3 M sodium acetate and 2 volumes of 100% ethanol. The RNA was spun down, placed in RNAse free water and stored at −80° C.

[0509] AI Comprehensive Panel v1.0

[0510] Autoimmunity (AI) comprehensive panel v1.0 included two controls and 89 cDNA test samples isolated from male (M) and female (F) surgical and postmortem human tissues that were obtained from the Backus Hospital and Clinomics (Frederick, Md.). Tissue samples included: normal, adjacent (Adj); matched normal adjacent (match control); joint tissues (synovial (Syn) fluid, synovium, bone and cartilage, osteoarthritis (OA), rheumatoid arthritis (RA)); psoriatic; ulcerative colitis colon; Crohns disease colon; and emphysmatic, asthmatic, allergic and chronic obstructive pulmonary disease (COPD) lung.

[0511] Pulmonary and General Inflammation (PGI) Panel v1.0

[0512] Pulmonary and General inflammation (PGI) panel v1.0 included two controls and 39 test samples isolated as surgical or postmortem samples. Tissue samples include: five normal lung samples obtained from Maryland Brain and Tissue Bank, University of Maryland (Baltimore, Md.), International Bioresource systems, IBS (Tuscon, Ariz.), and Asterand (Detroit, Mich.), five normal adjacent intestine tissues (NAT) from Ardais (Lexington, Mass.), ulcerative colitis samples (UC) from Ardais (Lexington, Mass.); Crohns disease colon from NDRI, National Disease Research Interchange (Philadelphia, Pa.); emphysematous tissue samples from Ardais (Lexington, Mass.) and Genomic Collaborative Inc. (Cambridge, Mass.), asthmatic tissue from Maryland Brain and Tissue Bank, University of Maryland (Baltimore, Md.) and Genomic Collaborative Inc (Cambridge, Mass.) and fibrotic tissue from Ardais (Lexinton, Mass.) and Genomic Collaborative (Cambridge, Mass.).

[0513] AI.05 Chondrosarcoma

[0514] AI.05 chondrosarcoma plates included SW1353 cells (ATCC) subjected to serum starvation and treated for 6 and 18 h with cytokines that are known to induce MMP (1, 3 and 13) synthesis (e.g. IL 1beta). These treatments included: IL-1beta (10 ng/ml), IL-1beta +TNF-alpha (50 ng/ml), IL-1beta+Oncostatin (50 ng/ml) and PMA (100 ng/ml). Supernatants were collected and analyzed for MMP 1, 3 and 13 production. RNA was prepared from these samples using standard procedures.

[0515] Panels 5D and 5I

[0516] Panel 5D and 5I included two controls and cDNAs isolated from human tissues, human pancreatic islets cells, cell lines, metabolic tissues obtained from patients enrolled in the Gestational Diabetes study (described below), and cells from different stages of adipocyte differentiation, including differentiated (AD), midway differentiated (AM), and undifferentiated (U; human mesenchymal stem cells).

[0517] Gestational Diabetes study subjects were young (18-40 years), otherwise healthy women with and without gestational diabetes undergoing routine (elective) Caesarean section. Uterine wall smooth muscle (UT), visceral (Vis) adipose, skeletal muscle (SK), placenta (Pl) greater omentum adipose (GO Adipose) and subcutaneous (SubQ) adipose samples (<1 cc) were collected, rinsed in sterile saline, blotted and flash frozen in liquid nitrogen. Patients included: Patient 2, an overweight diabetic Hispanic not on insulin; Patient 7-9, obese non-diabetic Caucasians with body mass index (BMI) greater than 30; Patient 10, an overweight diabetic Hispanic, on insulin; Patient 11, an overweight nondiabetic African American; and Patient 12, a diabetic Hispanic on insulin.

[0518] Differentiated adipocytes were obtained from induced donor progenitor cells (Clonetics, Walkersville, Md.). Differentiated human mesenchymal stem cells (HuMSCs) were prepared as described in Mark F. Pittenger, et al., Multilineage Potential of Adult Human Mesenchymal Stem Cells Science Apr. 2, 1999: 143-147. mRNA was isolated and sscDNA was produced from Trizol lysates or frozen pellets. Human cell lines (ATCC, NCI or German tumor cell bank) included: kidney proximal convoluted tubule, uterine smooth muscle cells, small intestine, liver HepG2 cancer cells, heart primary stromal cells and adrenal cortical adenoma cells. Cells were cultured, RNA extracted and sscDNA was produced using standard procedures

[0519] Panel 5I also contains pancreatic islets (Diabetes Research Institute at the University of Miami School of Medicine).

[0520] Human Metabolic RTQ-PCR Panel

[0521] Human Metabolic RTQ-PCR Panel included two controls (genomic DNA control and chemistry control) and 211 cDNAs isolated from human tissues and cell lines relevant to metabolic diseases. This panel identifies genes that play a role in the etiology and pathogenesis of obesity and/or diabetes. Metabolic tissues including placenta (Pl), uterine wall smooth muscle (Ut), visceral adipose, skeletal muscle (Sk) and subcutaneous (SubQ) adipose were obtained from the Gestational Diabetes study (described above). Included in the panel are: Patients 7 and 8, obese non-diabetic Caucasians; Patient 12 a diabetic Caucasian with unknown BMI, on insulin (treated); Patient 13, an overweight diabetic Caucasian, not on insulin (untreated); Patient 15, an obese, untreated, diabetic Caucasian; Patient 17 and 25, untreated diabetic Caucasians of normal weight; Patient 18, an obese, untreated, diabetic Hispanic; Patient 19, a non-diabetic Caucasian of normal weight; Patient 20, an overweight, treated diabetic Caucasian; Patient 21 and 23, overweight non-diabetic Caucasians; Patient 22, a treated diabetic Caucasian of normal weight; Patient 23, an overweight non-diabetic Caucasian; and Patients 26 and 27, obese , treated, diabetic Caucasians.

[0522] Total RNA was isolated from metabolic tissues including: hypothalamus; liver, pancreas, pancreatic islets, small intestine, psoas muscle, diaphragm muscle, visceral (Vis) adipose, subcutaneous (SubQ) adipose and greater omentum (Go) from 12 Type II diabetic (Diab) patients and 12 non diabetic (Norm) at autopsy. Control diabetic and non-diabetic subjects were matched where possible for: age; sex, male (M); female (F); ethnicity, Caucasian (CC); Hispanic (HI); African American (AA); Asian (AS); and BMI, 20-25 (Low BM), 26-30 (Med BM) or overweight (Overwt), BMI greater than 30 (Hi BMI) (obese).

[0523] RNA was extracted and ss cDNA was produced from cell lines (ATCC) by standard methods.

[0524] CNS Panels

[0525] CNS Panels CNSD.01, CNS Neurodegeneration V1.0 and CNS Neurodegeneration V2.0 included two controls and 46 to 94 test cDNA samples isolated from postmortem human brain tissue obtained from the Harvard Brain Tissue Resource Center (McLean Hospital). Brains were removed from calvaria of donors between 4 and 24 hours after death, and frozen at −80° C. in liquid nitrogen vapor.

[0526] Panel CNSD.01

[0527] Panel CNSD.01 included two specimens each from: Alzheimer's disease, Parkinson's disease, Huntington's disease, Progressive Supernuclear Palsy (PSP), Depression, and normal controls. Collected tissues included: cingulate gyrus (Cing Gyr), temporal pole (Temp Pole), globus palladus (Glob palladus), substantia nigra (Sub Nigra), primary motor strip (Brodman Area 4), parietal cortex (Brodman Area 7), prefrontal cortex (Brodman Area 9), and occipital cortex (Brodman area 17). Not all brain regions are represented in all cases.

[0528] Panel CNS Neurodegeneration V1.0

[0529] The CNS Neurodegeneration V1.0 panel included: six Alzheimer's disease (AD) brains and eight normals which included no dementia and no Alzheimer's like pathology (control) or no dementia but evidence of severe Alzheimer's like pathology (Control Path), specifically senile plaque load rated as level 3 on a scale of 0-3; 0 no evidence of plaques, 3 severe AD senile plaque load. Tissues collected included: hippocampus, temporal cortex (Brodman Area 21), parietal cortex (Brodman area 7), occipital cortex (Brodman area 17) superior temporal cortex (Sup Temporal Ctx) and inferior temporal cortex (Inf Temproal Ctx).

[0530] Gene expression was analyzed after normalization using a scaling factor calculated by subtracting the Well mean (CT average for the specific tissue) from the Grand mean (average CT value for all wells across all runs). The scaled CT value is the result of the raw CT value plus the scaling factor.

[0531] Panel CNS Neurodegeneration V2.0

[0532] The CNS Neurodegeneration V2.0 panel included sixteen cases of Alzheimer's disease (AD) and twenty-nine normal controls (no evidence of dementia prior to death) including fourteen controls (Control) with no dementia and no Alzheimer's like pathology and fifteen controls with no dementia but evidence of severe Alzheimer's like pathology (AH3), specifically senile plaque load rated as level 3 on a scale of 0-3; 0 no evidence of plaques, 3 severe AD senile plaque load. Tissues from the temporal cortex (Brodman Area 21) included the inferior and superior temporal cortex that was pooled from a given individual (Inf & Sup Temp Ctx Pool).

[0533] A. CG103945-02: Semaphorin sem2.

[0534] Expression of gene CG103945-02 was assessed using the primer-probe set Ag7442, described in Table AA. Results of the RTQ-PCR runs are shown in Tables AB and AC.

TABLE AA

Probe Name Ag7442

| | |
|---|---|
| Start | SEQ |

| | | | | |
|---|---|---|---|---|
| Primers | Sequences | Length | Position | ID No |

| | | | | |
|---|---|---|---|---|
| Forward | 5′-gaaagccttccagcaccat-3′ | 19 | 128 | 283 |
| Probe | TET-5′-tggatggaaacattttccagatacctcc-3′-TAMRA | 28 | 148 | 284 |
| Reverse | 5′-gcccagaaagatggcagag-3′ | 19 | 189 | 285 |

[0535] TABLE AB
General screening panel v1.7

| Tissue Name | A |
|---|---|
| Adipose | 100.0 |
| HUVEC | 16.6 |
| Melanoma* Hs688(A).T | 0.0 |
| Melanoma* Hs688(B).T | 0.5 |
| Melanoma (met) SK-MEL-5 | 1.7 |
| Testis | 2.1 |
| Prostate ca. (bone met) PC-3 | 0.0 |
| Prostate ca. DU145 | 1.9 |
| Prostate pool | 1.5 |
| Uterus pool | 0.5 |
| Ovarian ca. OVCAR-3 | 0.0 |
| Ovarian ca. (ascites) SK-OV-3 | 0.0 |
| Ovarian ca. OVCAR-4 | 11.7 |
| Ovarian ca. OVCAR-5 | 7.2 |
| Ovarian ca. IGROV-1 | 2.9 |
| Ovarian ca. OVCAR-8 | 5.8 |
| Ovary | 13.6 |
| Breast ca. MCF-7 | 0.0 |
| Breast ca. MDA-MB-231 | 6.0 |
| Breast ca. BT-549 | 0.0 |
| Breast ca. T47D | 11.0 |
| Breast pool | 5.7 |
| Trachea | 13.0 |
| Lung | 66.0 |
| Fetal Lung | 12.3 |
| Lung ca. NCI-N417 | 0.0 |
| Lung ca. LX-1 | 0.0 |
| Lung ca. NCI-H146 | 0.0 |
| Lung ca. SHP-77 | 17.8 |
| Lung ca. NCI-H23 | 0.7 |
| Lung ca. NCI-H460 | 1.3 |
| Lung ca. HOP-62 | 0.0 |
| Lung ca. NCI-H522 | 4.4 |
| Lung ca. DMS-114 | 0.8 |
| Liver | 0.0 |
| Fetal Liver | 1.9 |
| Kidney pool | 28.7 |
| Fetal Kidney | 7.2 |
| Renal ca. 786-0 | 0.0 |
| Renal ca. A498 | 0.0 |
| Renal ca. ACHN | 0.0 |
| Renal ca. UO-31 | 0.0 |
| Renal ca. TK-10 | 0.0 |
| Bladder | 6.1 |
| Gastric ca. (liver met.) NCI-N87 | 0.0 |
| Stomach | 0.6 |
| Colon ca. SW-948 | 2.7 |
| Colon ca. SW480 | 0.0 |
| Colon ca. (SW480 met) SW620 | 5.1 |
| Colon ca. HT29 | 0.0 |
| Colon ca. HCT-116 | 19.1 |
| Colon cancer tissue | 0.9 |
| Colon ca. SW1116 | 5.9 |
| Colon ca. Colo-205 | 0.0 |
| Colon ca. SW-48 | 0.0 |
| Colon | 4.1 |
| Small Intestine | 0.8 |
| Fetal Heart | 2.0 |
| Heart | 1.3 |
| Lymph Node pool 1 | 2.1 |
| Lymph Node pool 2 | 20.7 |
| Fetal Skeletal Muscle | 6.8 |
| Skeletal Muscle pool | 1.1 |
| Skeletal Muscle | 9.7 |
| Spleen | 9.0 |
| Thymus | 1.1 |
| CNS cancer (glio/astro) SF-268 | 0.0 |
| CNS cancer (glio/astro) T98G | 0.0 |
| CNS cancer (neuro; met) SK-N-AS | 0.0 |
| CNS cancer (astro) SF-539 | 0.9 |
| CNS cancer (astro) SNB-75 | 0.0 |
| CNS cancer (glio) SNB-19 | 0.9 |
| CNS cancer (glio) SF-295 | 0.0 |
| Brain (Amygdala) | 3.1 |
| Brain (Cerebellum) | 22.4 |
| Brain (Fetal) | 6.2 |
| Brain (Hippocampus) | 4.5 |
| Cerebral Cortex pool | 5.1 |
| Brain (Substantia nigra) | 2.0 |
| Brain (Thalamus) | 4.1 |
| Brain (Whole) | 29.7 |
| Spinal Cord | 2.3 |
| Adrenal Gland | 2.8 |
| Pituitary Gland | 1.6 |
| Salivary Gland | 20.2 |
| Thyroid | 7.5 |
| Pancreatic ca. PANC-1 | 0.6 |
| Pancreas pool | 0.0 |

Column A - Rel. Exp. (%) Ag7442, Run 318350211

[0536] TABLE AC
Panel 4.1D

| Tissue Name | A |
|---|---|
| Secondary Th1 act | 0.0 |
| Secondary Th2 act | 4.4 |
| Secondary Tr1 act | 0.0 |
| Secondary Th1 rest | 0.0 |
| Secondary Th2 rest | 0.0 |
| Secondary Tr1 rest | 0.0 |
| Primary Th1 act | 0.0 |
| Primary Th2 act | 0.0 |
| Primary Tr1 act | 0.0 |
| Primary Th1 rest | 0.0 |
| Primary Th2 rest | 0.0 |
| Primary Tr1 rest | 0.0 |
| CD45RA CD4 lymphocyte act | 0.0 |
| CD45RO CD4 lymphocyte act | 0.0 |
| CD8 lymphocyte act | 0.0 |
| Secondary CD8 lymphocyte rest | 0.0 |
| Secondary CD8 lymphocyte act | 0.0 |
| CD4 lymphocyte none | 0.0 |
| 2ry Th1/Th2/Tr1_anti-CD95 CH11 | 0.0 |
| LAK cells rest | 0.0 |
| LAK cells IL-2 | 0.0 |
| LAK cells IL-2 + IL-12 | 0.0 |
| LAK cells IL-2 + IFN gamma | 0.0 |
| LAK cells IL-2 + IL-18 | 0.0 |
| LAK cells PMA/ionomycin | 0.0 |
| NK Cells IL-2 rest | 0.0 |
| Two Way MLR 3 day | 0.0 |
| Two Way MLR 5 day | 0.0 |
| Two Way MLR 7 day | 0.0 |
| PBMC rest | 0.0 |
| PBMC PWM | 0.0 |
| PBMC PHA-L | 0.0 |
| Ramos (B cell) none | 0.0 |
| Ramos (B cell) ionomycin | 0.0 |
| B lymphocytes PWM | 0.0 |
| B lymphocytes CD40L and IL-4 | 0.0 |
| EOL-1 dbcAMP | 6.1 |
| EOL-1 dbcAMP PMA/ionomycin | 4.2 |
| Dendritic cells none | 0.0 |
| Dendritic cells LPS | 3.6 |
| Dendritic cells anti-CD40 | 0.0 |
| Monocytes rest | 0.0 |
| Monocytes LPS | 0.0 |
| Macrophages rest | 0.0 |
| Macrophages LPS | 0.0 |
| HUVEC none | 0.0 |
| HUVEC starved | 11.0 |
| HUVEC IL-1beta | 4.7 |
| HUVEC IFN gamma | 0.0 |
| HUVEC TNF alpha + IFN gamma | 0.0 |
| HUVEC TNF alpha + IL4 | 2.6 |
| HUVEC IL-11 | 13.4 |
| Lung Microvascular EC none | 100.0 |
| Lung Microvascular EC TNFalpha + IL-1beta | 48.3 |
| Microvascular Dermal EC none | 30.4 |
| Microsvasular Dermal EC TNFalpha + IL-1beta | 19.9 |
| Bronchial epithelium TNFalpha + IL1beta | 0.0 |
| Small airway epithelium none | 0.0 |
| Small airway epithelium TNFalpha + IL-1beta | 0.0 |
| Coronery artery SMC rest | 0.0 |
| Coronery artery SMC TNFalpha + IL-1beta | 0.0 |
| Astrocytes rest | 0.0 |
| Astrocytes TNFalpha + IL-1beta | 0.0 |
| KU-812 (Basophil) rest | 0.0 |
| KU-812 (Basophil) PMA/ionomycin | 5.0 |
| CCD1106 (Keratinocytes) none | 0.0 |
| CCD1106 (Keratinocytes) TNFalpha + IL-1beta | 0.0 |
| Liver cirrhosis | 11.9 |
| NCI-H292 none | 0.0 |
| NCI-H292 IL-4 | 0.0 |
| NCI-H292 IL-9 | 0.0 |
| NCI-H292 IL-13 | 0.0 |
| NCI-H292 IFN gamma | 0.0 |
| HPAEC none | 4.7 |
| HPAEC TNF alpha + IL-1 beta | 5.2 |
| Lung fibroblast none | 0.0 |
| Lung fibroblast TNF alpha + IL-1 beta | 0.0 |
| Lung fibroblast IL-4 | 0.0 |
| Lung fibroblast IL-9 | 0.0 |
| Lung fibroblast IL-13 | 0.0 |
| Lung fibroblast IFN gamma | 0.0 |
| Dermal fibroblast CCD1070 rest | 0.0 |
| Dermal fibroblast CCD1070 TNF alpha | 0.0 |
| Dermal fibroblast CCD1070 IL-1 beta | 0.0 |
| Dermal fibroblast IFN gamma | 0.0 |
| Dermal fibroblast IL-4 | 0.0 |
| Dermal Fibroblasts rest | 5.6 |
| Neutrophils TNFa + LPS | 0.0 |
| Neutrophils rest | 0.0 |
| Colon | 14.5 |
| Lung | 0.0 |
| Thymus | 0.0 |
| Kidney | 6.0 |

Column A - Rel. Exp. (%) Ag7442, Run 306067441

General_screening_panel_v1.7 Summary: Ag7442 Highest expression of the CG103945-02 gene was detected in adipose tissue (CT=29.5). In addition, significant expression of this gene was also seen in skeletal muscle and thyroid. Therapeutic modulation of the activity of this gene or its protein product is useful in the treatment of metabolic disorders, including diabetes and obesity.

[0538] Moderate levels of expression of this gene were also seen in all regions of the central nervous system examined, including amygdala, hippocampus, substantia nigra, thalamus, cerebellum, cerebral cortex, and spinal cord. Therapeutic modulation of the activity of this gene or its protein product is useful in the treatment of central nervous system disorders such as Alzheimer's disease, Parkinson's disease, epilepsy, multiple sclerosis, schizophrenia and depression.

[0539] Moderate to low expression of this gene was seen in number of cancer cell lines derived from colon, lung, breast and ovarian cancers. Therapeutic modulation of the activity of this gene or its protein product is useful in the treatment of colon, lung, breast and ovarian cancers.

[0540] Panel 4.1D Summary: Ag7442 Highest expression of this gene was seen in lung microvascular endothelium (CT=33.6) and its expression was down-regulated upon activation of these cells. Endothelial cells are known to play important roles in inflammatory responses by altering the expression of surface proteins that are involved in activation and recruitment of effector inflammatory cells. Higher expression of this gene in resting cells suggests a role for this gene in the maintenance of the integrity of the lung microvasculature. Therapeutic modulation of the activity of this gene or its protein product is beneficial for the treatment of diseases associated with damaged microvasculature including heart diseases or inflammatory diseases, such as psoriasis, asthma, and chronic obstructive pulmonary diseases.

[0541] B. CG106951-01 and CG106951-04: Semaphorin 5B.

[0542] Expression of gene CG106951-01 and CG106951-04 was assessed using the primer-probe sets Ag1216, described in Tables BA.

TABLE BA
Probe Name Ag1216

| | | | Start | SEQ ID |
|---|---|---|---|---|
| Primers | Sequences | Length | Position | No |
| Forward | 5′-cccgaagaatgaaaagta | 22 | 3351 | 286 |
| | caca-3′ | | | |
| Probe | TET-5′-cccatggaattcaa | 26 | 3373 | 287 |
| | gaccctgaacaa-3′-TAMRA | | | |
| Reverse | 5′-aatgggtagaagttggct | 22 | 3419 | 288 |
| | ctgt-3′ | | | |

[0543] TABLE BB
AI comprehensive panel v1.0

| Tissue Name | A |
|---|---|
| 110967 COPD-F | 10.4 |
| 110980 COPD-F | 23.5 |
| 110968 COPD-M | 13.6 |
| 110977 COPD-M | 64.6 |
| 110989 Emphysema-F | 35.4 |
| 110992 Emphysema-F | 13.5 |
| 110993 Emphysema-F | 27.4 |
| 110994 Emphysema-F | 5.6 |
| 110995 Emphysema-F | 15.3 |
| 110996 Emphysema-F | 7.2 |
| 110997 Asthma-M | 9.2 |
| 111001 Asthma-F | 24.0 |
| 111002 Asthma-F | 26.6 |
| 111003 Atopic Asthma-F | 35.1 |
| 111004 Atopic Asthma-F | 24.1 |
| 111005 Atopic Asthma-F | 14.0 |
| 111006 Atopic Asthma-F | 3.2 |
| 111417 Allergy-M | 18.0 |
| 112347 Allergy-M | 0.5 |
| 112349 Normal Lung-F | 0.5 |
| 112357 Normal Lung-F | 56.6 |
| 112354 Normal Lung-M | 14.0 |
| 112374 Crohns-F | 42.3 |
| 112389 Match Control Crohns-F | 61.6 |
| 112375 Crohns-F | 25.7 |
| 112732 Match Control Crohns-F | 7.5 |
| 112725 Crohns-M | 3.1 |
| 112387 Match Control Crohns-M | 60.7 |
| 112378 Crohns-M | 0.8 |
| 112390 Match Control Crohns-M | 24.5 |
| 112726 Crohns-M | 24.1 |
| 112731 Match Control Crohns-M | 12.4 |
| 112380 Ulcer Col-F | 18.6 |
| 112734 Match Control Ulcer Col-F | 30.6 |
| 112384 Ulcer Col-F | 45.7 |
| 112737 Match Control Ulcer Col-F | 16.5 |
| 112386 Ulcer Col-F | 13.8 |
| 112738 Match Control Ulcer Col-F | 3.0 |
| 112381 Ulcer Col-M | 1.5 |
| 112735 Match Control Ulcer Col-M | 8.8 |
| 112382 Ulcer Col-M | 25.7 |
| 112394 Match Control Ulcer Col-M | 21.2 |
| 112383 Ulcer Col-M | 42.6 |
| 112736 Match Control Ulcer Col-M | 22.8 |
| 112423 Psoriasis-F | 43.8 |
| 112427 Match Control Psoriasis-F | 29.7 |
| 112418 Psoriasis-M | 8.4 |
| 112723 Match Control Psoriasis-M | 2.2 |
| 112419 Psoriasis-M | 16.3 |
| 112424 Match Control Psoriasis-M | 24.0 |
| 112420 Psoriasis-M | 41.5 |
| 112425 Match Control Psoriasis-M | 43.5 |
| 104689 (MF) OA Bone-Backus | 35.6 |
| 104690 (MF) Adj “Normal” Bone-Backus | 12.5 |
| 104691 (MF) OA Synovium-Backus | 14.9 |
| 104692 (BA) OA Cartilage-Backus | 0.0 |
| 104694 (BA) OA Bone-Backus | 10.5 |
| 104695 (BA) Adj “Normal” Bone-Backus | 5.7 |
| 104696 (BA) OA Synovium-Backus | 6.7 |
| 104700 (SS) OA Bone-Backus | 6.0 |
| 104701 (SS) Adj “Normal” Bone-Backus | 5.8 |
| 104702 (SS) OA Synovium-Backus | 48.3 |
| 117093 OA Cartilage Rep7 | 23.5 |
| 112672 OA Bone5 | 26.1 |
| 112673 OA Synovium5 | 14.0 |
| 112674 OA Synovial Fluid cells5 | 12.6 |
| 117100 OA Cartilage Rep14 | 6.7 |
| 112756 OA Bone9 | 100.0 |
| 112757 OA Synovium9 | 2.1 |
| 112758 OA Synovial Fluid Cells9 | 28.9 |
| 117125 RA Cartilage Rep2 | 5.2 |
| 113492 Bone2 RA | 5.0 |
| 113493 Synovium2 RA | 16.2 |
| 113494 Syn Fluid Cells RA | 16.5 |
| 113499 Cartilage4 RA | 13.2 |
| 113500 Bone4 RA | 9.2 |
| 113501 Synovium4 RA | 12.6 |
| 113502 Syn Fluid Cells4 RA | 8.9 |
| 113495 Cartilage3 RA | 5.6 |
| 113496 Bone3 RA | 8.3 |
| 113497 Synovium3 RA | 4.7 |
| 113498 Syn Fluid Cells3 RA | 5.1 |
| 117106 Normal Cartilage Rep20 | 10.7 |
| 113663 Bone3 Normal | 1.1 |
| 113664 Synovium3 Normal | 0.0 |
| 113665 Syn Fluid Cells3 Normal | 0.9 |
| 117107 Normal Cartilage Rep22 | 12.6 |
| 113667 Bone4 Normal | 4.3 |
| 113668 Synovium4 Normal | 10.4 |
| 113669 Syn Fluid Cells4 Normal | 7.0 |

Column A - Rel. Exp. (%) Ag1216, Run 233667803

[0544] TABLE BC
General screening panel v1.4

| Tissue Name | A |
|---|---|
| Adipose | 1.3 |
| Melanoma* Hs688(A).T | 0.0 |
| Melanoma* Hs688(B).T | 0.0 |
| Melanoma* M14 | 0.0 |
| Melanoma* LOXIMVI | 0.0 |
| Melanoma* SK-MEL-5 | 0.0 |
| Squamous cell carcinoma SCC-4 | 0.1 |
| Testis Pool | 0.4 |
| Prostate ca.* (bone met) PC-3 | 0.0 |
| Prostate Pool | 1.0 |
| Placenta | 1.8 |
| Uterus Pool | 0.8 |
| Ovarian ca. OVCAR-3 | 18.8 |
| Ovarian ca. SK-OV-3 | 0.0 |
| Ovarian ca. OVCAR-4 | 0.0 |
| Ovarian ca. OVCAR-5 | 0.6 |
| Ovarian ca. IGROV-1 | 0.5 |
| Ovarian ca. OVCAR-8 | 0.3 |
| Ovary | 1.8 |
| Breast ca. MCF-7 | 0.1 |
| Breast ca. MDA-MB-231 | 0.0 |
| Breast ca. BT 549 | 15.2 |
| Breast ca. T47D | 1.4 |
| Breast ca. MDA-N | 0.0 |
| Breast Pool | 2.1 |
| Trachea | 0.7 |
| Lung | 0.3 |
| Fetal Lung | 10.3 |
| Lung ca. NCI-N417 | 0.0 |
| Lung ca. LX-1 | 0.0 |
| Lung ca. NCI-H146 | 0.2 |
| Lung ca. SHP-77 | 0.0 |
| Lung ca. A549 | 0.0 |
| Lung ca. NCI-H526 | 0.0 |
| Lung ca. NCI-H23 | 0.2 |
| Lung ca. NCI-H460 | 0.0 |
| Lung ca. HOP-62 | 0.0 |
| Lung ca. NCI-H522 | 0.2 |
| Liver | 0.1 |
| Fetal Liver | 1.9 |
| Liver ca. HepG2 | 0.0 |
| Kidney Pool | 0.8 |
| Fetal Kidney | 16.6 |
| Renal ca. 786-0 | 100.0 |
| Renal ca. A498 | 3.6 |
| Renal ca. ACHN | 0.1 |
| Renal ca. UO-31 | 0.1 |
| Renal ca. TK-10 | 0.1 |
| Bladder | 1.0 |
| Gastric ca. (liver met.) NCI-N87 | 0.1 |
| Gastric ca. KATO III | 0.0 |
| Colon ca. SW-948 | 0.0 |
| Colon ca. SW480 | 0.0 |
| Colon ca.* (SW480 met) SW620 | 0.2 |
| Colon ca. HT29 | 0.0 |
| Colon ca. HCT-116 | 0.1 |
| Colon ca. CaCo-2 | 0.4 |
| Colon cancer tissue | 0.5 |
| Colon ca. SW1116 | 0.0 |
| Colon ca. Colo-205 | 0.0 |
| Colon ca. SW-48 | 0.0 |
| Colon Pool | 2.0 |
| Small Intestine Pool | 1.0 |
| Stomach Pool | 1.0 |
| Bone Marrow Pool | 1.0 |
| Fetal Heart | 12.9 |
| Heart Pool | 0.9 |
| Lymph Node Pool | 1.9 |
| Fetal Skeletal Muscle | 12.8 |
| Skeletal Muscle Pool | 0.4 |
| Spleen Pool | 0.1 |
| Thymus Pool | 1.0 |
| CNS cancer (glio/astro) U87-MG | 0.0 |
| CNS cancer (glio/astro) U-118-MG | 2.0 |
| CNS cancer (neuro; met) SK-N-AS | 2.1 |
| CNS cancer (astro) SF-539 | 0.1 |
| CNS cancer (astro) SNB-75 | 5.4 |
| CNS cancer (glio) SNB-19 | 0.3 |
| CNS cancer (glio) SF-295 | 0.0 |
| Brain (Amygdala) Pool | 3.6 |
| Brain (cerebellum) | 3.7 |
| Brain (fetal) | 30.1 |
| Brain (Hippocampus) Pool | 3.6 |
| Cerebral Cortex Pool | 6.5 |
| Brain (Substantia nigra) Pool | 4.6 |
| Brain (Thalamus) Pool | 6.0 |
| Brain (whole) | 13.0 |
| Spinal Cord Pool | 1.2 |
| Adrenal Gland | 2.0 |
| Pituitary gland Pool | 0.5 |
| Salivary Gland | 0.1 |
| Thyroid (female) | 0.2 |
| Pancreatic ca. CAPAN2 | 0.0 |
| Pancreas Pool | 2.4 |

Column A - Rel. Exp. (%) Ag1216, Run 212696280

[0545] TABLE BD
Panel 3D

| Tissue Name | A |
|---|---|
| Daoy- Medulloblastoma | 0.9 |
| TE671- Medulloblastoma | 0.0 |
| D283 Med- Medulloblastoma | 2.8 |
| PFSK-1- Primitive Neuroectodermal | 0.9 |
| XF-498- CNS | 0.0 |
| SNB-78- Glioma | 3.7 |
| SF-268- Glioblastoma | 0.0 |
| T98G- Glioblastoma | 0.0 |
| SK-N-SH- Neuroblastoma (metastasis) | 2.7 |
| SF-295- Glioblastoma | 0.0 |
| Cerebellum | 1.3 |
| Cerebellum | 5.0 |
| NCI-H292- Mucoepidermoid lung carcinoma | 1.7 |
| DMS-114- Small cell lung cancer | 0.8 |
| DMS-79- Small cell lung cancer | 100.0 |
| NCI-H146- Small cell lung cancer | 3.3 |
| NCI-H526- Small cell lung cancer | 0.0 |
| NCI-N417- Small cell lung cancer | 0.0 |
| NCI-H82- Small cell lung cancer | 3.6 |
| NCI-H157- Squamous cell lung cancer (metastasis) | 0.0 |
| NCI-H1155- Large cell lung cancer | 0.0 |
| NCI-H1299- Large cell lung cancer | 0.0 |
| NCI-H727- Lung carcinoid | 0.0 |
| NCI-UMC-11- Lung carcinoid | 0.0 |
| LX-1- Small cell lung cancer | 0.0 |
| Colo-205- Colon cancer | 0.0 |
| KM12- Colon cancer | 0.0 |
| KM20L2- Colon cancer | 0.0 |
| NCI-H716- Colon cancer | 0.0 |
| SW-48- Colon adenocarcinoma | 0.0 |
| SW1116- Colon adenocarcinoma | 0.0 |
| LS 174T- Colon adenocarcinoma | 0.0 |
| SW-948- Colon adenocarcinoma | 0.0 |
| SW-480- Colon adenocarcinoma | 0.0 |
| NCI-SNU-5- Gastric carcinoma | 0.0 |
| KATO III- Gastric carcinoma | 0.0 |
| NCI-SNU-16- Gastric carcinoma | 0.0 |
| NCI-SNU-1- Gastric carcinoma | 0.0 |
| RF-1- Gastric adenocarcinoma | 0.0 |
| RF-48- Gastric adenocarcinoma | 0.3 |
| MKN-45- Gastric carcinoma | 0.0 |
| NCI-N87- Gastric carcinoma | 0.6 |
| OVCAR-5- Ovarian carcinoma | 0.0 |
| RL95-2- Uterine carcinoma | 0.0 |
| HelaS3- Cervical adenocarcinoma | 0.0 |
| Ca Ski- Cervical epidermoid carcinoma (metastasis) | 0.0 |
| ES-2- Ovarian clear cell carcinoma | 0.0 |
| Ramos- Stimulated with PMA/ionomycin 6 h | 0.0 |
| Ramos- Stimulated with PMA/ionomycin 14 h | 0.0 |
| MEG-01- Chronic myelogenous leukemia | 0.0 |
| (megokaryoblast) | |
| Raji- Burkitt's lymphoma | 1.4 |
| Daudi- Burkitt's lymphoma | 0.0 |
| U266- B-cell plasmacytoma | 0.0 |
| CA46- Burkitt's lymphoma | 0.0 |
| RL- non-Hodgkin's B-cell lymphoma | 0.0 |
| JM1- pre-B-cell lymphoma | 0.0 |
| Jurkat- T cell leukemia | 0.0 |
| TF-1- Erythroleukemia | 0.0 |
| HUT 78- T-cell lymphoma | 0.0 |
| U937- Histiocytic lymphoma | 0.0 |
| KU-812- Myelogenous leukemia | 0.0 |
| 769-P- Clear cell renal carcinoma | 1.9 |
| Caki-2- Clear cell renal carcinoma | 2.1 |
| SW 839- Clear cell renal carcinoma | 8.8 |
| Rhabdoid kidney tumor | 0.2 |
| Hs766T- Pancreatic carcinoma (LN metastasis) | 0.0 |
| CAPAN-1- Pancreatic adenocarcinoma (liver | 0.0 |
| metastasis) | |
| SU86.86- Pancreatic carcinoma (liver metastasis) | 2.8 |
| BxPC-3- Pancreatic adenocarcinoma | 0.0 |
| HPAC- Pancreatic adenocarcinoma | 0.0 |
| MIA PaCa-2- Pancreatic carcinoma | 0.0 |
| CFPAC-1- Pancreatic ductal adenocarcinoma | 0.0 |
| PANC-1- Pancreatic epithelioid ductal carcinoma | 1.7 |
| T24- Bladder carcinma (transitional cell) | 0.0 |
| 5637- Bladder carcinoma | 2.0 |
| HT-1197- Bladder carcinoma | 0.0 |
| UM-UC-3- Bladder carcinma (transitional cell) | 0.6 |
| A204- Rhabdomyosarcoma | 0.0 |
| HT-1080- Fibrosarcoma | 0.0 |
| MG-63- Osteosarcoma | 0.0 |
| SK-LMS-1- Leiomyosarcoma (vulva) | 0.0 |
| SJRH30- Rhabdomyosarcoma (met to bone marrow) | 0.0 |
| A431- Epidermoid carcinoma | 0.0 |
| WM266-4- Melanoma | 0.0 |
| DU 145- Prostate carcinoma (brain metastasis) | 0.0 |
| MDA-MB-468- Breast adenocarcinoma | 0.8 |
| SCC-4- Squamous cell carcinoma of tongue | 0.0 |
| SCC-9- Squamous cell carcinoma of tongue | 0.8 |
| SCC-15- Squamous cell carcinoma of tongue | 0.0 |
| CAL 27- Squamous cell carcinoma of tongue | 0.0 |

Column A - Rel. Exp. (%) Ag1216, Run 182098855

[0546] TABLE BE
Panel 4D

| Tissue Name | A | B |
|---|---|---|
| Secondary Th1 act | 0.0 | 0.0 |
| Secondary Th2 act | 0.0 | 0.0 |
| Secondary Tr1 act | 0.0 | 0.0 |
| Secondary Th1 rest | 0.0 | 0.0 |
| Secondary Th2 rest | 0.0 | 0.0 |
| Secondary Tr1 rest | 0.0 | 0.0 |
| Primary Th1 act | 0.0 | 0.0 |
| Primary Th2 act | 0.0 | 0.0 |
| Primary Tr1 act | 0.0 | 0.0 |
| Primary Th1 rest | 0.0 | 0.0 |
| Primary Th2 rest | 1.1 | 0.0 |
| Primary Tr1 rest | 0.0 | 0.9 |
| CD45RA CD4 lymphocyte act | 0.0 | 0.0 |
| CD45RO CD4 lymphocyte act | 0.8 | 0.0 |
| CD8 lymphocyte act | 0.0 | 0.0 |
| Secondary CD8 lymphocyte rest | 0.0 | 1.3 |
| Secondary CD8 lymphocyte act | 0.0 | 0.0 |
| CD4 lymphocyte none | 0.0 | 0.9 |
| 2ry Th1/Th2/Tr1_anti-CD95 CH11 | 0.0 | 0.0 |
| LAK cells rest | 0.0 | 0.0 |
| LAK cells IL-2 | 0.0 | 0.0 |
| LAK cells IL-2 + IL-12 | 0.0 | 1.9 |
| LAK cells IL-2 + IFN gamma | 1.1 | 0.0 |
| LAK cells IL-2 + IL-18 | 0.0 | 0.0 |
| LAK cells PMA/ionomycin | 0.0 | 0.0 |
| NK Cells IL-2 rest | 0.0 | 0.0 |
| Two Way MLR 3 day | 0.0 | 0.0 |
| Two Way MLR 5 day | 0.0 | 0.0 |
| Two Way MLR 7 day | 0.0 | 0.0 |
| PBMC rest | 0.0 | 0.0 |
| PBMC PWM | 2.8 | 2.5 |
| PBMC PHA-L | 0.0 | 3.1 |
| Ramos (B cell) none | 0.0 | 0.0 |
| Ramos (B cell) ionomycin | 0.0 | 0.0 |
| B lymphocytes PWM | 0.0 | 0.0 |
| B lymphocytes CD40L and IL-4 | 1.1 | 0.0 |
| EOL-1 dbcAMP | 0.0 | 0.0 |
| EOL-1 dbcAMP PMA/ionomycin | 0.0 | 0.0 |
| Dendritic cells none | 0.0 | 0.0 |
| Dendritic cells LPS | 0.0 | 0.0 |
| Dendritic cells anti-CD40 | 0.0 | 0.0 |
| Monocytes rest | 0.0 | 0.0 |
| Monocytes LPS | 0.0 | 0.0 |
| Macrophages rest | 0.0 | 0.0 |
| Macrophages LPS | 0.8 | 0.0 |
| HUVEC none | 0.0 | 0.0 |
| HUVEC starved | 0.0 | 0.0 |
| HUVEC IL-1beta | 0.0 | 1.3 |
| HUVEC IFN gamma | 0.0 | 0.0 |
| HUVEC TNF alpha + IFN gamma | 0.0 | 0.0 |
| HUVEC TNF alpha + IL4 | 0.0 | 0.0 |
| HUVEC IL-11 | 0.9 | 0.0 |
| Lung Microvascular EC none | 0.0 | 0.0 |
| Lung Microvascular EC TNFalpha + IL-1beta | 0.0 | 0.0 |
| Microvascular Dermal EC none | 0.0 | 0.0 |
| Microsvasular Dermal EC TNFalpha + IL-1beta | 0.0 | 0.0 |
| Bronchial epithelium TNFalpha + IL1beta | 20.3 | 31.9 |
| Small airway epithelium none | 1.8 | 2.0 |
| Small airway epithelium TNFalpha + IL-1beta | 2.7 | 2.5 |
| Coronery artery SMC rest | 0.0 | 0.0 |
| Coronery artery SMC TNFalpha + IL-1beta | 0.0 | 0.0 |
| Astrocytes rest | 12.8 | 16.3 |
| Astrocytes TNFalpha + IL-1beta | 5.3 | 13.5 |
| KU-812 (Basophil) rest | 0.0 | 0.0 |
| KU-812 (Basophil) PMA/ionomycin | 0.0 | 0.0 |
| CCD1106 (Keratinocytes) none | 1.4 | 0.0 |
| CCD1106 (Keratinocytes) TNFalpha + IL-1beta | 0.0 | 4.1 |
| Liver cirrhosis | 1.9 | 2.3 |
| Lupus kidney | 5.9 | 10.3 |
| NCI-H292 none | 1.6 | 0.0 |
| NCI-H292 IL-4 | 0.7 | 0.0 |
| NCI-H292 IL-9 | 0.0 | 2.8 |
| NCI-H292 IL-13 | 0.0 | 0.0 |
| NCI-H292 IFN gamma | 0.0 | 0.0 |
| HPAEC none | 0.0 | 0.0 |
| HPAEC TNF alpha + IL-1 beta | 0.0 | 0.0 |
| Lung fibroblast none | 0.0 | 0.0 |
| Lung fibroblast TNF alpha + IL-1 beta | 0.0 | 0.0 |
| Lung fibroblast IL-4 | 0.0 | 0.0 |
| Lung fibroblast IL-9 | 0.0 | 0.0 |
| Lung fibroblast IL-13 | 0.0 | 0.0 |
| Lung fibroblast IFN gamma | 0.0 | 0.0 |
| Dermal fibroblast CCD1070 rest | 0.0 | 0.0 |
| Dermal fibroblast CCD1070 TNF alpha | 0.0 | 0.0 |
| Dermal fibroblast CCD1070 IL-1 beta | 0.0 | 0.0 |
| Dermal fibroblast IFN gamma | 0.0 | 0.0 |
| Dermal fibroblast IL-4 | 0.0 | 1.5 |
| IBD Colitis 2 | 0.0 | 1.2 |
| IBD Crohn's | 1.4 | 4.0 |
| Colon | 3.4 | 2.7 |
| Lung | 52.1 | 42.3 |
| Thymus | 100.0 | 100.0 |
| Kidney | 1.6 | 0.0 |

Column A - Rel. Exp. (%) Ag1216, Run 140426332
Column B - Rel. Exp. (%) Ag1216, Run 144134834

[0547] TABLE BF
Panel 5 Islet

| Tissue Name | A |
|---|---|
| 97457_Patient-02go_adipose | 41.8 |
| 97476_Patient-07sk_skeletal muscle | 36.3 |
| 97477_Patient-07ut_uterus | 34.9 |
| 97478_Patient-07pl_placenta | 100.0 |
| 99167_Bayer Patient 1 | 0.0 |
| 97482_Patient-08ut_uterus | 23.5 |
| 97483_Patient-08pl_placenta | 35.1 |
| 97486_Patient-09sk_skeletal muscle | 9.1 |
| 97487_Patient-09ut_uterus | 81.2 |
| 97488_Patient-09pl_placenta | 26.6 |
| 97492_Patient-10ut_uterus | 75.3 |
| 97493_Patient-10pl_placenta | 50.0 |
| 97495_Patient-11go_adipose | 57.8 |
| 97496_Patient-11sk_skeletal muscle | 34.2 |
| 97497_Patient-11ut_uterus | 89.5 |
| 97498_Patient-11pl_placenta | 77.9 |
| 97500_Patient-12go_adipose | 70.7 |
| 97501_Patient-12sk_skeletal muscle | 43.2 |
| 97502_Patient-12ut_uterus | 97.3 |
| 97503_Patient-12pl_placenta | 24.5 |
| 94721_Donor 2 U - A_Mesenchymal Stem Cells | 0.0 |
| 94722_Donor 2 U - B_Mesenchymal Stem Cells | 0.0 |
| 94723_Donor 2 U - C_Mesenchymal Stem Cells | 0.0 |
| 94709_Donor 2 AM - A_adipose | 0.0 |
| 94710_Donor 2 AM - B_adipose | 0.0 |
| 94711_Donor 2 AM - C_adipose | 0.0 |
| 94712_Donor 2 AD - A_adipose | 0.0 |
| 94713_Donor 2 AD - B_adipose | 0.0 |
| 94714_Donor 2 AD - C_adipose | 0.0 |
| 94742_Donor 3 U - A_Mesenchymal Stem Cells | 0.0 |
| 94743_Donor 3 U - B_Mesenchymal Stem Cells | 0.0 |
| 94730_Donor 3 AM - A_adipose | 0.0 |
| 94731_Donor 3 AM - B_adipose | 0.0 |
| 94732_Donor 3 AM - C_adipose | 0.0 |
| 94733_Donor 3 AD - A_adipose | 0.0 |
| 94734_Donor 3 AD - B_adipose | 0.0 |
| 94735_Donor 3 AD - C_adipose | 0.0 |
| 77138_Liver_HepG2untreated | 0.0 |
| 73556_Heart_Cardiac stromal cells (primary) | 0.0 |
| 81735_Small Intestine | 29.3 |
| 72409_Kidney_Proximal Convoluted Tubule | 0.0 |
| 82685_Small intestine_Duodenum | 6.9 |
| 90650_Adrenal_Adrenocortical adenoma | 17.7 |
| 72410_Kidney_HRCE | 5.5 |
| 72411_Kidney_HRE | 4.9 |
| 73139_Uterus_Uterine smooth muscle cells | 0.0 |

Column A - Rel. Exp. (%) Ag1216, Run 237228676

[0548] TABLE BG
general oncology screening panel v 2.4

| Tissue Name | A |
|---|---|
| Colon cancer 1 | 0.9 |
| Colon cancer NAT 1 | 0.5 |
| Colon cancer 2 | 0.2 |
| Colon cancer NAT 2 | 0.3 |
| Colon cancer 3 | 0.7 |
| Colon cancer NAT 3 | 0.4 |
| Colon malignant cancer 4 | 1.3 |
| Colon normal adjacent tissue 4 | 0.2 |
| Lung cancer 1 | 0.7 |
| Lung NAT 1 | 0.1 |
| Lung cancer 2 | 10.8 |
| Lung NAT 2 | 0.1 |
| Squamous cell carcinoma 3 | 2.0 |
| Lung NAT 3 | 0.0 |
| metastatic melanoma 1 | 1.4 |
| Melanoma 2 | 0.0 |
| Melanoma 3 | 0.5 |
| metastatic melanoma 4 | 2.7 |
| metastatic melanoma 5 | 8.0 |
| Bladder cancer 1 | 0.2 |
| Bladder cancer NAT 1 | 0.0 |
| Bladder cancer 2 | 0.3 |
| Bladder cancer NAT 2 | 0.1 |
| Bladder cancer NAT 3 | 0.0 |
| Bladder cancer NAT 4 | 0.6 |
| Prostate adenocarcinoma 1 | 0.9 |
| Prostate adenocarcinoma 2 | 0.1 |
| Prostate adenocarcinoma 3 | 0.1 |
| Prostate adenocarcinoma 4 | 0.5 |
| Prostate cancer NAT 5 | 0.2 |
| Prostate adenocarcinoma 6 | 0.1 |
| Prostate adenocarcinoma 7 | 0.0 |
| Prostate adenocarcinoma 8 | 0.1 |
| Prostate adenocarcinoma 9 | 1.5 |
| Prostate cancer NAT 10 | 0.1 |
| Kidney cancer 1 | 77.9 |
| Kidney NAT 1 | 5.7 |
| Kidney cancer 2 | 100.0 |
| Kidney NAT 2 | 3.4 |
| Kidney cancer 3 | 46.0 |
| Kidney NAT 3 | 2.4 |
| Kidney cancer 4 | 85.3 |
| Kidney NAT 4 | 1.2 |

Column A - Rel. Exp. (%) Ag1216 Run 259733296

AI_comprehensive panel_v1.0 Summary: Ag1216 Highest expression of the CG106951-01 and CG106951-04 genes was detected in a sample orthoarthritis bone (CT=31.2). Moderate to low levels of expression of these genes were detected in samples derived from normal and orthoarthitis/rheumatoid arthritis bone, cartilage, synovium and synovial fluid samples, as well as in normal lung, COPD lung, emphysema, atopic asthma, asthma, allergy, Crohn's disease (normal matched control and diseased), ulcerative colitis (normal matched control and diseased), and psoriasis (normal matched control and diseased). Therapeutic modulation of the activity of these genes or their protein products will ameliorate symptoms/conditions associated with autoimmune and inflammatory disorders including psoriasis, allergy, asthma, inflammatory bowel disease, rheumatoid arthritis and osteoarthritis.
General_screening_panel_v1.4 Summary: Ag1216 Highest expression of these genes was detected in renal cancer cell line 786-0 (CT=26.4). High to moderate expression of these genes was also seen in number of cancer cell lines derived from ovarian, breast, brain and kidney cancers. Therapeutic modulation of the activity of these genes or their protein products is useful in the treatment of these cancers.

[0551] Among tissues with metabolic or endocrine function, these genes were expressed at moderate to low levels in pancreas, adipose, adrenal gland, pituitary gland, skeletal muscle, heart, fetal liver and the gastrointestinal tract. Therapeutic modulation of the activity of these genes or their protein products is useful in the treatment of endocrine/metabolically related diseases, such as obesity and diabetes.

[0552] In addition, these genes were expressed at moderate levels in all regions of the central nervous system examined, including amygdala, hippocampus, substantia nigra, thalamus, cerebellum, cerebral cortex, and spinal cord. Therapeutic modulation of the activity of these genes or their protein products is useful in the treatment of central nervous system disorders such as Alzheimer's disease, Parkinson's disease, epilepsy, multiple sclerosis, schizophrenia and depression.

[0553] The CG106951-01 and CG106951-04 genes were also expressed at higher levels in fetal (CTs=29-32) liver, lung, heart, kidney and skeletal muscle when compared to adult tissues (CTs=33-37). The relative overexpression of these genes in fetal tissue suggests that the expressed proteins may enhance growth or development of these tissues in the fetus and thus may also act in a regenerative capacity in the adult. Therapeutic modulation of the activity of these genes or their protein products is useful in treatment of liver, lung, kidney, heart and skeletal muscle related diseases.

[0554] Panel 3D Summary: Ag1216 Moderate expression of these genes were detected mainly in a lung cancer DMS-79 cell line (CT=30.4). Therapeutic modulation of the activity of these genes or their protein products is useful in the treatment of lung cancer.

[0555] Panel 4D Summary: Ag1216 Highest expression of these genes was detected in thymus (CTs=31-32). These genes also show low expression in normal lung as well as in astrocytes and bronchial epithelium treated with TNF-α and IL-1β. Therapeutic modulation of the activity of these genes or their protein products is useful in the treatment of inflammatory diseases including asthma, allergies, inflammatory bowel disease, lupus erythematosus, psoriasis, rheumatoid arthritis, and osteoarthritis.

[0556] Panel 5 Islet Summary: Ag1216 Highest expression of these genes were detected in placenta (CT=34). Low expression of these genes was also seen in adipose and uterus. Please see panel 1.4 for further discussion of these genes.

[0557] General oncology screening panel_v_{—}2.4 Summary: Ag1216 Highest expression of these genes was detected in a kidney cancer sample (CT=27). Expression of these genes was higher in 4/4 kidney cancer, 3/3 colon cancer, and 3/3 lung cancer samples relative to corresponding normal adjacent tissue. In addition, significant expression of these genes was also seen in metastatic melanoma and prostate cancers. Gene or protein expression levels are useful as a marker to detect the presence of these cancers. Therapeutic modulation of the activity of these genes or their protein products using nucleic acid, protein, antibody or small molecule drugs is useful in the treatment of kidney, lung, colon, metastatic melanoma and prostate cancers.

[0558] C. CG124756-01: Complement Component 1, q Subcomponent, Beta Polypeptide.

[0559] Expression of gene CG124756-01 was assessed using the primer-probe set Ag4901, described in Table CA. Results of the RTQ-PCR runs are shown in Tables CB and CC.

TABLE CA
Probe Name Ag4901

| | | | Start | SEQ ID |
|---|---|---|---|---|
| Primers | Sequences | Length | Position | No |
| Forward | 5′-ccacgtgatcaccaac | 19 | 503 | 289 |
| | atg-3′ | | | |
| Probe | TET-5′-aacaacaattatga | 25 | 522 | 290 |
| | gccccgcagtg-3′-TAMRA | | | |
| Reverse | 5′-tggcgtggtaggtgaagt | 22 | 576 | 291 |
| | agta-3′ | | | |

[0560] TABLE CB
CNS neurodegeneration v1.0
Column A - Rel. Exp. (%) Ag4901, 224996029

| Tissue Name | A |
|---|---|
| AD 1 Hippo | 77.9 |
| AD 2 Hippo | 72.7 |
| AD 3 Hippo | 39.0 |
| AD 4 Hippo | 23.3 |
| AD 5 Hippo | 30.6 |
| AD 6 Hippo | 7.6 |
| Control 2 Hippo | 63.3 |
| Control 4 Hippo | 65.5 |
| Control (Path) 3 Hippo | 23.8 |
| AD 1 Temporal Ctx | 62.9 |
| AD 2 Temporal Ctx | 43.8 |
| AD 3 Temporal Ctx | 25.9 |
| AD 4 Temporal Ctx | 33.0 |
| AD 5 Inf Temporal Ctx | 30.8 |
| AD 5 Sup Temporal Ctx | 71.7 |
| AD 6 Inf Temporal Ctx | 100.0 |
| AD 6 Sup Temporal Ctx | 79.6 |
| Control 1 Temporal Ctx | 22.8 |
| Control 2 Temporal Ctx | 53.2 |
| Control 3 Temporal Ctx | 49.3 |
| Control 3 Temporal Ctx | 16.0 |
| Control (Path) 1 Temporal Ctx | 18.3 |
| Control (Path) 2 Temporal Ctx | 21.8 |
| Control (Path) 3 Temporal Ctx | 10.2 |
| Control (Path) 4 Temporal Ctx | 17.4 |
| AD 1 Occipital Ctx | 39.8 |
| AD 2 Occipital Ctx (Missing) | 0.4 |
| AD 3 Occipital Ctx | 13.2 |
| AD 4 Occipital Ctx | 18.6 |
| AD 5 Occipital Ctx | 39.8 |
| AD 6 Occipital Ctx | 20.2 |
| Control 1 Occipital Ctx | 7.1 |
| Control 2 Occipital Ctx | 21.9 |
| Control 3 Occipital Ctx | 24.7 |
| Control 4 Occipital Ctx | 27.5 |
| Control (Path) 1 Occipital Ctx | 11.0 |
| Control (Path) 2 Occipital Ctx | 11.7 |
| Control (Path) 3 Occipital Ctx | 0.9 |
| Control (Path) 4 Occipital Ctx | 15.8 |
| Control 1 Parietal Ctx | 26.8 |
| Control 2 Parietal Ctx | 38.4 |
| Control 3 Parietal Ctx | 27.7 |
| Control (Path) 1 Parietal Ctx | 12.5 |
| Control (Path) 2 Parietal Ctx | 14.0 |
| Control (Path) 3 Parietal Ctx | 3.0 |
| Control (Path) 4 Parietal Ctx | 19.9 |

[0561] TABLE CC
General screening panel v1.6
Column A - Rel. Exp. (%) Ag4901, Run 277231336

| Tissue Name | A |
|---|---|
| Adipose | 35.8 |
| Melanoma* Hs688(A).T | 0.0 |
| Melanoma* Hs688(B).T | 0.0 |
| Melanoma* M14 | 0.0 |
| Melanoma* LOXIMVI | 0.0 |
| Melanoma* SK-MEL-5 | 0.0 |
| Squamous cell carcinoma SCC-4 | 0.0 |
| Testis Pool | 9.9 |
| Prostate ca.* (bone met) PC-3 | 0.0 |
| Prostate Pool | 11.5 |
| Placenta | 73.2 |
| Uterus Pool | 1.0 |
| Ovarian ca. OVCAR-3 | 0.0 |
| Ovarian ca. SK-OV-3 | 0.0 |
| Ovarian ca. OVCAR-4 | 0.0 |
| Ovarian ca. OVCAR-5 | 0.0 |
| Ovarian ca. IGROV-1 | 0.0 |
| Ovarian ca. OVCAR-8 | 0.0 |
| Ovary | 21.6 |
| Breast ca. MCF-7 | 0.0 |
| Breast ca. MDA-MB-231 | 0.0 |
| Breast ca. BT 549 | 0.0 |
| Breast ca. T47D | 0.0 |
| Breast ca. MDA-N | 0.0 |
| Breast Pool | 8.0 |
| Trachea | 19.8 |
| Lung | 2.3 |
| Fetal Lung | 13.9 |
| Lung ca. NCI-N417 | 0.0 |
| Lung ca. LX-1 | 0.0 |
| Lung ca. NCI-H146 | 0.0 |
| Lung ca. SHP-77 | 0.0 |
| Lung ca. A549 | 0.0 |
| Lung ca. NCI-H526 | 0.0 |
| Lung ca. NCI-H23 | 0.0 |
| Lung ca. NCI-H460 | 0.0 |
| Lung ca. HOP-62 | 0.0 |
| Lung ca. NCI-H522 | 0.0 |
| Liver | 18.4 |
| Fetal Liver | 55.9 |
| Liver ca. HepG2 | 0.0 |
| Kidney Pool | 14.1 |
| Fetal Kidney | 4.7 |
| Renal ca. 786-0 | 0.0 |
| Renal ca. A498 | 0.0 |
| Renal ca. ACHN | 0.0 |
| Renal ca. UO-31 | 0.0 |
| Renal ca. TK-10 | 0.0 |
| Bladder | 100.0 |
| Gastric ca. (liver met.) NCI-N87 | 0.0 |
| Gastric ca. KATO III | 0.0 |
| Colon ca. SW-948 | 0.0 |
| Colon ca. SW480 | 0.0 |
| Colon ca.* (SW480 met) SW620 | 0.0 |
| Colon ca. HT29 | 0.0 |
| Colon ca. HCT-116 | 0.0 |
| Colon ca. CaCo-2 | 0.0 |
| Colon cancer tissue | 75.8 |
| Colon ca. SW1116 | 0.0 |
| Colon ca. Colo-205 | 0.2 |
| Colon ca. SW-48 | 0.0 |
| Colon Pool | 11.6 |
| Small Intestine Pool | 6.8 |
| Stomach Pool | 14.8 |
| Bone Marrow Pool | 12.7 |
| Fetal Heart | 1.9 |
| Heart Pool | 5.1 |
| Lymph Node Pool | 11.1 |
| Fetal Skeletal Muscle | 7.3 |
| Skeletal Muscle Pool | 2.0 |
| Spleen Pool | 27.2 |
| Thymus Pool | 13.2 |
| CNS cancer (glio/astro) U87-MG | 0.0 |
| CNS cancer (glio/astro) U-118-MG | 0.1 |
| CNS cancer (neuro; met) SK-N-AS | 0.0 |
| CNS cancer (astro) SF-539 | 0.0 |
| CNS cancer (astro) SNB-75 | 0.0 |
| CNS cancer (glio) SNB-19 | 0.0 |
| CNS cancer (glio) SF-295 | 0.0 |
| Brain (Amygdala) Pool | 7.8 |
| Brain (cerebellum) | 26.8 |
| Brain (fetal) | 8.1 |
| Brain (Hippocampus) Pool | 13.2 |
| Cerebral Cortex Pool | 8.2 |
| Brain (Substantia nigra) Pool | 8.4 |
| Brain (Thalamus) Pool | 8.3 |
| Brain (whole) | 22.4 |
| Spinal Cord Pool | 18.3 |
| Adrenal Gland | 55.1 |
| Pituitary gland Pool | 3.9 |
| Salivary Gland | 5.8 |
| Thyroid (female) | 6.8 |
| Pancreatic ca. CAPAN2 | 0.0 |
| Pancreas Pool | 6.9 |

CNS_neurodegeneration_v10 Summary: Ag4901 Expression of the CG124756-01 gene was upregulated in the temporal cortex of Alzheimer's disease patients compared to normal patients. Inhibition of this gene or its protein product is useful in the treatment of Alzheimer's disease and can decrease neuronal death.
General_screening_panel_v1.6 Summary: Ag4901 The highest expression of this gene was detected in bladder (CT=26). In addition, this gene was expressed at high to moderate levels in pancreas, adipose, adrenal gland, thyroid, pituitary gland, skeletal muscle, heart, liver and the gastrointestinal tract. Therapeutic modulation of the activity of this gene or its protein product is useful in the treatment of endocrine/metabolically related diseases, such as obesity and diabetes.

[0564] This gene was also expressed at moderate levels in all regions of the central nervous system examined, including amygdala, hippocampus, substantia nigra, thalamus, cerebellum, cerebral cortex, and spinal cord. Thereapeutic modulation of the activity of this gene or its protein product using nucleic acid, protein, antibody or small molecule drugs is useful in the treatment of central nervous system disorders such as Alzheimer's disease, Parkinson's disease, epilepsy, multiple sclerosis, schizophrenia and depression.

[0565] High expression of this gene was also seen in a colon cancer cell line. Therapeutic modulation of the activity of this gene or its protein product is useful in the treatment of colon cancer.

[0566] D. CG50353-01: 129293352_EXT, Wnt 7a like Protein.

[0567] Expression of gene CG50353-01 was assessed using the primer-probe set Ag3093, described in Table DA. Results of the RTQ-PCR runs are shown in Tables DB and DC.

TABLE DA
Probe Name Ag3093

| | | | Start | SEQ ID |
|---|---|---|---|---|
| Primers | Sequences | Length | Position | No |
| Forward | 5′-ctgtgacctcatgtgct | 20 | 909 | 292 |
| | gtg-3′ | | | |
| Probe | TET-5′-gtggctacaacacc | 25 | 932 | 293 |
| | caccagtacgc-3′-TAMRA | | | |
| Reverse | 5′-acatagcagcaccagtg | 20 | 982 | 294 |
| | gaa-3′ | | | |

[0568] TABLE DB
Panel 1.3D
Column A - Rel. Exp. (%) Ag3093, Run 167985246

| Tissue Name | A |
|---|---|
| Liver adenocarcinoma | 2.8 |
| Pancreas | 0.0 |
| Pancreatic ca. CAPAN 2 | 1.7 |
| Adrenal gland | 0.0 |
| Thyroid | 0.0 |
| Salivary gland | 0.0 |
| Pituitary gland | 0.0 |
| Brain (fetal) | 3.6 |
| Brain (whole) | 1.5 |
| Brain (amygdala) | 1.8 |
| Brain (cerebellum) | 0.9 |
| Brain (hippocampus) | 1.4 |
| Brain (substantia nigra) | 0.9 |
| Brain (thalamus) | 0.0 |
| Cerebral Cortex | 3.5 |
| Spinal cord | 0.6 |
| glio/astro U87-MG | 0.6 |
| glio/astro U-118-MG | 0.0 |
| astrocytoma SW1783 | 0.0 |
| neuro*; met SK-N-AS | 0.0 |
| astrocytoma SF-539 | 0.2 |
| astrocytoma SNB-75 | 0.1 |
| glioma SNB-19 | 0.0 |
| glioma U251 | 0.0 |
| glioma SF-295 | 0.0 |
| Heart (fetal) | 0.0 |
| Heart | 0.0 |
| Skeletal muscle (fetal) | 0.0 |
| Skeletal muscle | 0.0 |
| Bone marrow | 0.0 |
| Thymus | 0.0 |
| Spleen | 0.3 |
| Lymph node | 0.0 |
| Colorectal | 0.0 |
| Stomach | 0.0 |
| Small intestine | 0.0 |
| Colon ca. SW480 | 0.4 |
| Colon ca.* SW620(SW480 met) | 1.4 |
| Colon ca. HT29 | 0.0 |
| Colon ca. HCT-116 | 0.0 |
| Colon ca. CaCo-2 | 0.2 |
| Colon ca. tissue(ODO3866) | 0.0 |
| Colon ca. HCC-2998 | 0.1 |
| Gastric ca.* (liver met) NCI-N87 | 0.5 |
| Bladder | 0.0 |
| Trachea | 0.1 |
| Kidney | 0.0 |
| Kidney (fetal) | 0.1 |
| Renal ca. 786-0 | 0.2 |
| Renal ca. A498 | 0.0 |
| Renal ca. RXF 393 | 0.4 |
| Renal ca. ACHN | 0.0 |
| Renal ca. UO-31 | 0.5 |
| Renal ca. TK-10 | 0.0 |
| Liver | 0.0 |
| Liver (fetal) | 0.0 |
| Liver ca. (hepatoblast) HepG2 | 0.0 |
| Lung | 0.2 |
| Lung (fetal) | 0.9 |
| Lung ca. (small cell) LX-1 | 0.0 |
| Lung ca. (small cell) NCI-H69 | 0.2 |
| Lung ca. (s. cell var.) SHP-77 | 0.0 |
| Lung ca. (large cell)NCI-H460 | 0.0 |
| Lung ca. (non-sm. cell) A549 | 0.2 |
| Lung ca. (non-s. cell) NCI-H23 | 0.0 |
| Lung ca. (non-s. cell) HOP-62 | 0.0 |
| Lung ca. (non-s. cl) NCI-H522 | 0.0 |
| Lung ca. (squam.) SW 900 | 0.0 |
| Lung ca. (squam.) NCI-H596 | 0.3 |
| Mammary gland | 0.0 |
| Breast ca.* (pl. ef) MCF-7 | 0.2 |
| Breast ca.* (pl. ef) MDA-MB-231 | 0.0 |
| Breast ca.* (pl. ef) T47D | 0.0 |
| Breast ca. BT-549 | 0.0 |
| Breast ca. MDA-N | 0.0 |
| Ovary | 0.0 |
| Ovarian ca. OVCAR-3 | 0.1 |
| Ovarian ca. OVCAR-4 | 37.1 |
| Ovarian ca. OVCAR-5 | 0.7 |
| Ovarian ca. OVCAR-8 | 0.0 |
| Ovarian ca. IGROV-1 | 6.8 |
| Ovarian ca.* (ascites) SK-OV-3 | 100.0 |
| Uterus | 0.0 |
| Placenta | 0.0 |
| Prostate | 0.0 |
| Prostate ca.* (bone met)PC-3 | 2.0 |
| Testis | 0.3 |
| Melanoma Hs688(A).T | 0.0 |
| Melanoma* (met) Hs688(B).T | 0.0 |
| Melanoma UACC-62 | 0.0 |
| Melanoma M14 | 0.0 |
| Melanoma LOX IMVI | 0.0 |
| Melanoma* (met) SK-MEL-5 | 0.0 |
| Adipose | 0.2 |

[0569] TABLE DC
Panel 4D
Column A - Rel. Exp. (%) Ag3093, Run 164392077

| Tissue Name | A |
|---|---|
| Secondary Th1 act | 0.0 |
| Secondary Th2 act | 0.0 |
| Secondary Tr1 act | 0.0 |
| Secondary Th1 rest | 0.0 |
| Secondary Th2 rest | 0.0 |
| Secondary Tr1 rest | 0.0 |
| Primary Th1 act | 0.0 |
| Primary Th2 act | 0.0 |
| Primary Tr1 act | 0.0 |
| Primary Th1 rest | 0.0 |
| Primary Th2 rest | 0.0 |
| Primary Tr1 rest | 0.0 |
| CD45RA CD4 lymphocyte act | 0.0 |
| CD45RO CD4 lymphocyte act | 0.0 |
| CD8 lymphocyte act | 0.0 |
| Secondary CD8 lymphocyte rest | 0.0 |
| Secondary CD8 lymphocyte act | 0.0 |
| CD4 lymphocyte none | 4.9 |
| 2ry Th1/Th2/Tr1_anti-CD95 CH11 | 0.0 |
| LAK cells rest | 0.0 |
| LAK cells IL-2 | 0.0 |
| LAK cells IL-2 + IL-12 | 0.0 |
| LAK cells IL-2 + IFN gamma | 0.0 |
| LAK cells IL-2 + IL-18 | 0.0 |
| LAK cells PMA/ionomycin | 0.0 |
| NK Cells IL-2 rest | 0.0 |
| Two Way MLR 3 day | 0.0 |
| Two Way MLR 5 day | 0.0 |
| Two Way MLR 7 day | 0.0 |
| PBMC rest | 3.5 |
| PBMC PWM | 0.8 |
| PBMC PHA-L | 0.0 |
| Ramos (B cell) none | 0.0 |
| Ramos (B cell) ionomycin | 0.0 |
| B lymphocytes PWM | 0.0 |
| B lymphocytes CD40L and IL-4 | 0.0 |
| EOL-1 dbcAMP | 0.0 |
| EOL-1 dbcAMP PMA/ionomycin | 0.0 |
| Dendritic cells none | 0.0 |
| Dendritic cells LPS | 0.0 |
| Dendritic cells anti-CD40 | 0.0 |
| Monocytes rest | 0.0 |
| Monocytes LPS | 0.0 |
| Macrophages rest | 0.0 |
| Macrophages LPS | 0.0 |
| HUVEC none | 0.0 |
| HUVEC starved | 0.0 |
| HUVEC IL-1beta | 0.0 |
| HUVEC IFN gamma | 0.0 |
| HUVEC TNF alpha + IFN gamma | 0.0 |
| HUVEC TNF alpha + IL4 | 0.0 |
| HUVEC IL-11 | 0.0 |
| Lung Microvascular EC none | 0.0 |
| Lung Microvascular EC TNFalpha + IL-1beta | 0.0 |
| Microvascular Dermal EC none | 0.0 |
| Microsvasular Dermal EC TNFalpha + IL-1beta | 0.0 |
| Bronchial epithelium TNFalpha + IL1beta | 57.4 |
| Small airway epithelium none | 17.7 |
| Small airway epithelium TNFalpha + IL-1beta | 100.0 |
| Coronery artery SMC rest | 0.0 |
| Coronery artery SMC TNFalpha + IL-1beta | 0.0 |
| Astrocytes rest | 0.0 |
| Astrocytes TNFalpha + IL-1beta | 0.0 |
| KU-812 (Basophil) rest | 0.0 |
| KU-812 (Basophil) PMA/ionomycin | 1.2 |
| CCD1106 (Keratinocytes) none | 47.6 |
| CCD1106 (Keratinocytes) TNFalpha + IL-1beta | 33.7 |
| Liver cirrhosis | 1.4 |
| Lupus kidney | 0.0 |
| NCI-H292 none | 4.1 |
| NCI-H292 IL-4 | 4.8 |
| NCI-H292 IL-9 | 1.8 |
| NCI-H292 IL-13 | 2.5 |
| NCI-H292 IFN gamma | 1.6 |
| HPAEC none | 0.0 |
| HPAEC TNF alpha + IL-1 beta | 0.0 |
| Lung fibroblast none | 0.0 |
| Lung fibroblast TNF alpha + IL-1 beta | 0.0 |
| Lung fibroblast IL-4 | 0.0 |
| Lung fibroblast IL-9 | 0.0 |
| Lung fibroblast IL-13 | 0.0 |
| Lung fibroblast IFN gamma | 0.0 |
| Dermal fibroblast CCD1070 rest | 0.0 |
| Dermal fibroblast CCD1070 TNF alpha | 0.0 |
| Dermal fibroblast CCD1070 IL-1 beta | 0.0 |
| Dermal fibroblast IFN gamma | 0.0 |
| Dermal fibroblast IL-4 | 0.0 |
| IBD Colitis 2 | 0.0 |
| IBD Crohn's | 0.0 |
| Colon | 1.0 |
| Lung | 2.0 |
| Thymus | 0.0 |
| Kidney | 0.0 |

Panel 1.3D Summary: Ag3093 Highest expression of the CG50353-01 gene was detected in the SK-OV-3 ovarian cancer cell line derived from ascites fluid (CT=30.28). This gene was also expressed in two additional ovarian cancer cell lines. Gene or protein expression levels are useful as a marker for ovarian cancer or for ascites. Therapeutic modulation of the activity of this gene or its protein product using nucleic acid, protein, antibody or small molecule drugs is useful in the treatment of ovarian cancer.
Panel 4D Summary: This gene was expressed at the highest level in TNF alpha+IL-1 beta-treated small airway epithelial cells (CT=32.6) and bronchial epithelial cells as well as in CCD1106 keratinocytes, independent of treatment. Expression of this gene in keratinocytes suggests that it is important in skin disorders including psoriasis. Expression of this gene in airway/bronchial cell types suggests that this gene also plays a role in inflammatory lung disorders, including, for example, chronic obstructive pulmonary disease (COPD), asthma, allergy and emphysema. Therapeutic modulation of the activity of this gene or its protein product is useful in the treatment of skin disorders, such as psoriasis, and inflammatory lung disorders, including COPD, asthma, allergy and emphysema.

[0572] E. CG50709-03 and CG50709-05: WNT14B

[0573] Expression of genes CG50709-03 and CG50709-05 was assessed using the primer-probe sets Ag2262, and Ag2316, described in Tables EA, and EB. Results of the RTQ-PCR runs are shown in Tables EC, ED, EE, and EF.

TABLE EA
Probe Name Ag2262

| | | | Start | SEQ ID |
|---|---|---|---|---|
| Primers | Sequences | Length | Position | No |
| Forward | 5′-gacctggtgtacatgga | 20 | 875 | 295 |
| | gga-3′ | | | |
| Probe | TET-5′-cttctgccggccca | 23 | 904 | 296 |
| | gcaagtact-3′-TAMRA | | | |
| Reverse | 5′-gagcacaccctacctg | 19 | 936 | 297 |
| | ctg-3′ | | | |

[0574] TABLE EB
Probe Name Ag2316

| | | | Start | SEQ ID |
|---|---|---|---|---|
| Primers | Sequences | Length | Position | No |
| Forward | 5′-gtccaagagaggaaacaa | 21 | 571 | 298 |
| | gga-3′ | | | |
| Probe | TET-5′-cacaatacccacgt | 24 | 614 | 299 |
| | gggcatcaag-3′-TAMRA | | | |
| Reverse | 5′-gtcctgaggccactctt | 20 | 641 | 300 |
| | cac-3′ | | | |

[0575] TABLE EC
Ardais Kidney 1.0
Column A - el. Exp. (%) Ag2262, Run 369787102

| Tissue Name | A |
|---|---|
| Kidney cancer(10A8) | 0.0 |
| Kidney NAT(10A9) | 1.1 |
| Kidney cancer(10AA) | 8.9 |
| Kidney NAT(10AB) | 15.3 |
| Kidney cancer(10AC) | 2.2 |
| Kidney NAT(10AD) | 100.0 |
| Kidney cancer(10B6) | 1.8 |
| Kidney NAT(10B7) | 4.5 |
| Kidney cancer(10B8) | 0.3 |
| Kidney NAT(10B9) | 4.1 |
| Kidney cancer(10BC) | 5.1 |
| Kidney NAT(10BD) | 54.7 |
| Kidney cancer(10BE) | 0.2 |
| Kidney NAT(10BF) | 32.3 |
| Kidney cancer(10C2) | 0.1 |
| Kidney NAT(10C3) | 11.7 |
| Kidney cancer(10C4) | 0.0 |
| Kidney NAT(10C5) | 8.2 |
| Kidney cancer(10B4) | 0.5 |
| Kidney cancer(10C8) | 1.3 |
| Kidney cancer(10D0) | 0.9 |
| Kidney cancer(10C0) | 0.3 |
| Kidney cancer(10C6) | 0.0 |
| Kidney cancer(10C9) | 0.0 |
| Kidney cancer(10D1) | 4.0 |
| Kidney cancer(10CA) | 1.9 |
| Kidney cancer(10D2) | 2.2 |
| Kidney cancer(10CB) | 1.0 |
| Kidney cancer(10D4) | 1.8 |
| Kidney cancer(10CD) | 1.5 |
| Kidney cancer(10D5) | 0.0 |
| Kidney cancer(10CE) | 2.6 |
| Kidney cancer(10D6) | 1.0 |
| Kidney cancer(10CF) | 1.2 |
| Kidney cancer(10D8) | 1.1 |
| Kidney cancer(10CC) | 1.2 |
| Kidney cancer(10D3) | 4.2 |
| Kidney NAT(10D9) | 15.2 |
| Kidney NAT(10DB) | 19.5 |
| Kidney NAT(10DC) | 8.7 |
| Kidney NAT(10DD) | 22.1 |
| Kidney NAT(10DE) | 10.2 |
| Kidney NAT(10B1) | 2.7 |
| Kidney NAT(10DA) | 19.3 |

[0576] TABLE ED
Panel 1.3D

| Tissue Name | A | B | C |
|---|---|---|---|
| Liver adenocarcinoma | 0.0 | 6.7 | 0.0 |
| Pancreas | 0.0 | 0.0 | 0.0 |
| Pancreatic ca. CAPAN 2 | 0.0 | 0.0 | 0.0 |
| Adrenal gland | 1.9 | 0.0 | 0.0 |
| Thyroid | 2.2 | 0.0 | 0.0 |
| Salivary gland | 0.3 | 0.0 | 0.0 |
| Pituitary gland | 0.0 | 8.0 | 0.0 |
| Brain (fetal) | 0.0 | 1.0 | 0.0 |
| Brain (whole) | 5.2 | 0.0 | 26.2 |
| Brain (amygdala) | 6.8 | 3.8 | 11.5 |
| Brain (cerebellum) | 1.0 | 6.4 | 0.0 |
| Brain (hippocampus) | 16.5 | 0.0 | 0.0 |
| Brain (substantia nigra) | 2.0 | 0.0 | 0.0 |
| Brain (thalamus) | 4.9 | 11.2 | 57.0 |
| Cerebral Cortex | 2.5 | 13.3 | 3.3 |
| Spinal cord | 3.3 | 9.2 | 6.8 |
| glio/astro U87-MG | 0.0 | 0.0 | 0.0 |
| glio/astro U-118-MG | 0.0 | 0.0 | 0.0 |
| Astrocytoma SW1783 | 0.0 | 0.0 | 0.0 |
| neuro*; met SK-N-AS | 0.0 | 0.0 | 0.0 |
| astrocytoma SF-539 | 0.0 | 0.0 | 0.0 |
| astrocytoma SNB-75 | 0.0 | 0.0 | 0.0 |
| glioma SNB-19 | 0.0 | 0.0 | 0.0 |
| glioma U251 | 0.0 | 0.0 | 0.0 |
| glioma SF-295 | 0.0 | 0.0 | 0.0 |
| Heart (fetal) | 2.0 | 0.0 | 33.4 |
| Heart | 0.0 | 6.7 | 9.6 |
| Skeletal muscle (fetal) | 2.5 | 0.0 | 8.2 |
| Skeletal muscle | 0.0 | 0.0 | 0.0 |
| Bone marrow | 0.9 | 0.0 | 0.0 |
| Thymus | 0.0 | 0.0 | 0.0 |
| Spleen | 100.0 | 65.5 | 100.0 |
| Lymph node | 0.0 | 0.0 | 0.0 |
| Colorectal | 10.8 | 19.8 | 0.0 |
| Stomach | 2.7 | 0.0 | 0.0 |
| Small intestine | 6.4 | 0.0 | 0.0 |
| Colon ca. SW480 | 0.0 | 0.0 | 0.0 |
| Colon ca.* SW620(SW480 met) | 1.2 | 0.0 | 0.0 |
| Colon ca. HT29 | 0.0 | 0.0 | 0.0 |
| Colon ca. HCT-116 | 0.0 | 0.0 | 0.0 |
| Colon ca. CaCo-2 | 2.5 | 6.6 | 0.0 |
| Colon ca. tissue(ODO3866) | 0.0 | 0.0 | 0.0 |
| Colon ca. HCC-2998 | 0.0 | 0.0 | 0.0 |
| Gastric ca.* (liver met) NCI-N87 | 0.0 | 14.7 | 0.0 |
| Bladder | 0.0 | 6.5 | 16.2 |
| Trachea | 5.0 | 0.0 | 6.0 |
| Kidney | 14.9 | 7.9 | 31.0 |
| Kidney (fetal) | 24.0 | 100.0 | 50.0 |
| Renal ca. 786-0 | 0.0 | 0.0 | 0.0 |
| Renal ca. A498 | 0.0 | 12.6 | 0.0 |
| Renal ca. RXF 393 | 0.0 | 0.0 | 0.0 |
| Renal ca. ACHN | 0.0 | 0.0 | 0.0 |
| Renal ca. UO-31 | 0.2 | 0.0 | 0.0 |
| Renal ca. TK-10 | 0.0 | 0.0 | 0.0 |
| Liver | 0.0 | 0.0 | 0.0 |
| Liver (fetal) | 0.0 | 0.0 | 0.0 |
| Liver ca. (hepatoblast) HepG2 | 0.0 | 0.0 | 0.0 |
| Lung | 6.8 | 0.0 | 19.3 |
| Lung (fetal) | 8.5 | 0.0 | 6.8 |
| Lung ca. (small cell) LX-1 | 0.0 | 0.0 | 0.0 |
| Lung ca. (small cell) NCI-H69 | 0.3 | 0.0 | 0.0 |
| Lung ca. (s. cell var.) SHP-77 | 2.5 | 6.9 | 0.0 |
| Lung ca. (large cell) NCI-H460 | 0.0 | 0.0 | 0.0 |
| Lung ca. (non-sm. cell) A549 | 0.0 | 6.4 | 0.0 |
| Lung ca. (non-s. cell) NCI-H23 | 0.0 | 0.0 | 0.0 |
| Lung ca. (non-s. cell) HOP-62 | 0.0 | 0.0 | 0.0 |
| Lungca. (non-s. cl) NCI-H522 | 2.8 | 0.0 | 0.0 |
| Lung ca. (squam.) SW 900 | 0.0 | 0.0 | 0.0 |
| Lung ca. (squam.) NCI-H596 | 0.0 | 0.0 | 0.0 |
| Mammary gland | 0.0 | 0.0 | 0.0 |
| Breast ca.* (pl. ef) MCF-7 | 0.0 | 0.0 | 0.0 |
| Breast ca.* (pl. ef) | 0.0 | 0.0 | 0.0 |
| MDA-MB-231 | | | |
| Breast ca.* (pl. ef) T47D | 0.0 | 0.0 | 0.0 |
| Breast ca. BT-549 | 0.0 | 0.0 | 0.0 |
| Breast ca. MDA-N | 1.0 | 0.0 | 0.0 |
| Ovary | 0.0 | 0.0 | 6.4 |
| Ovarian ca. OVCAR-3 | 0.0 | 0.0 | 0.0 |
| Ovarian ca. OVCAR-4 | 0.0 | 0.0 | 0.0 |
| Ovarian ca. OVCAR-5 | 0.0 | 0.0 | 0.0 |
| Ovarian ca. OVCAR-8 | 0.0 | 0.0 | 0.0 |
| Ovarian ca. IGROV-1 | 0.0 | 0.0 | 0.0 |
| Ovarian ca.* (ascites) | 0.0 | 0.0 | 0.0 |
| SK-OV-3 | | | |
| Uterus | 0.0 | 0.0 | 0.0 |
| Placenta | 0.6 | 7.1 | 0.0 |
| Prostate | 0.0 | 1.8 | 4.9 |
| Prostate ca.* (bone met) PC-3 | 0.0 | 0.0 | 0.0 |
| Testis | 1.7 | 0.0 | 7.2 |
| Melanoma Hs688(A).T | 0.0 | 0.0 | 0.0 |
| Melanoma* (met) Hs688(B).T | 0.0 | 0.0 | 0.0 |
| Melanoma UACC-62 | 0.0 | 0.0 | 0.0 |
| Melanoma M14 | 0.0 | 0.0 | 0.0 |
| Melanoma LOX IMVI | 0.0 | 0.0 | 0.0 |
| Melanoma* (met) SK-MEL-5 | 0.0 | 0.0 | 0.0 |
| Adipose | 0.0 | 0.0 | 7.6 |

Column A - Rel. Exp. (%) Ag2262, Run 150719071
Column B - Rel. Exp. (%) Ag2262, Run 167966858
Column C - Rel. Exp. (%) Ag2316, Run 162185396

[0577] TABLE EE
Panel 2D
Column A - Rel. Exp. (%) Ag2262, Run 150943107

| Tissue Name | A |
|---|---|
| Normal Colon | 14.2 |
| CC Well to Mod Diff (ODO3866) | 14.2 |
| CC Margin (ODO3866) | 0.0 |
| CC Gr. 2 rectosigmoid (ODO3868) | 0.0 |
| CC Margin (ODO3868) | 0.0 |
| CC Mod Diff (ODO3920) | 0.0 |
| CC Margin (ODO3920) | 0.8 |
| CC Gr. 2 ascend colon (ODO3921) | 0.0 |
| CC Margin (ODO3921) | 0.9 |
| CC from Partial Hepatectomy (ODO4309) | 0.0 |
| Mets | |
| Liver Margin (ODO4309) | 1.1 |
| Colon mets to lung (OD04451-01) | 7.3 |
| Lung Margin (OD04451-02) | 0.0 |
| Normal Prostate 6546-1 | 18.6 |
| Prostate Cancer (OD04410) | 10.2 |
| Prostate Margin (OD04410) | 0.0 |
| Prostate Cancer (OD04720-01) | 0.0 |
| Prostate Margin (OD04720-02) | 9.8 |
| Normal Lung 061010 | 22.5 |
| Lung Met to Muscle (ODO4286) | 6.1 |
| Muscle Margin (ODO4286) | 0.0 |
| Lung Malignant Cancer (OD03126) | 5.4 |
| Lung Margin (OD03126) | 0.0 |
| Lung Cancer (OD04404) | 7.6 |
| Lung Margin (OD04404) | 3.8 |
| Lung Cancer (OD04565) | 0.0 |
| Lung Margin (OD04565) | 0.0 |
| Lung Cancer (OD04237-01) | 0.0 |
| Lung Margin (OD04237-02) | 6.9 |
| Ocular Mel Met to Liver (ODO4310) | 1.1 |
| Liver Margin (ODO4310) | 28.5 |
| Melanoma Mets to Lung (OD04321) | 0.0 |
| Lung Margin (OD04321) | 0.0 |
| Normal Kidney | 100.0 |
| Kidney Ca, Nuclear grade 2 (OD04338) | 15.2 |
| Kidney Margin (OD04338) | 40.3 |
| Kidney Ca Nuclear grade ½ (OD04339) | 0.0 |
| Kidney Margin (OD04339) | 50.0 |
| Kidney Ca, Clear cell type (OD04340) | 0.0 |
| Kidney Margin (OD04340) | 31.2 |
| Kidney Ca, Nuclear grade 3 (OD04348) | 0.0 |
| Kidney Margin (OD04348) | 29.9 |
| Kidney Cancer (OD04622-01) | 0.0 |
| Kidney Margin (OD04622-03) | 58.6 |
| Kidney Cancer (OD04450-01) | 0.0 |
| Kidney Margin (OD04450-03) | 95.9 |
| Kidney Cancer 8120607 | 0.0 |
| Kidney Margin 8120608 | 24.0 |
| Kidney Cancer 8120613 | 0.0 |
| Kidney Margin 8120614 | 46.3 |
| Kidney Cancer 9010320 | 0.0 |
| Kidney Margin 9010321 | 16.5 |
| Normal Uterus | 16.4 |
| Uterus Cancer 064011 | 0.0 |
| Normal Thyroid | 15.6 |
| Thyroid Cancer 064010 | 0.0 |
| Thyroid Cancer A302152 | 6.8 |
| Thyroid Margin A302153 | 0.0 |
| Normal Breast | 9.3 |
| Breast Cancer (OD04566) | 0.0 |
| Breast Cancer (OD04590-01) | 4.8 |
| Breast Cancer Mets (OD04590-03) | 8.5 |
| Breast Cancer Metastasis | 0.0 |
| (OD04655-05) | |
| Breast Cancer 064006 | 7.2 |
| Breast Cancer 1024 | 0.0 |
| Breast Cancer 9100266 | 0.7 |
| Breast Margin 9100265 | 0.0 |
| Breast Cancer A209073 | 0.0 |
| Breast Margin A209073 | 0.0 |
| Normal Liver | 0.0 |
| Liver Cancer 064003 | 0.0 |
| Liver Cancer 1025 | 5.6 |
| Liver Cancer 1026 | 2.4 |
| Liver Cancer 6004-T | 0.0 |
| Liver Tissue 6004-N | 8.7 |
| Liver Cancer 6005-T | 0.0 |
| Liver Tissue 6005-N | 0.0 |
| Normal Bladder | 0.0 |
| Bladder Cancer 1023 | 0.0 |
| Bladder Cancer A302173 | 18.3 |
| Bladder Cancer (OD04718-01) | 0.0 |
| Bladder Normal Adjacent | 0.0 |
| (OD04718-03) | |
| Normal Ovary | 0.0 |
| Ovarian Cancer 064008 | 7.5 |
| Ovarian Cancer (OD04768-07) | 0.0 |
| Ovary Margin (OD04768-08) | 0.0 |
| Normal Stomach | 13.8 |
| Gastric Cancer 9060358 | 0.0 |
| Stomach Margin 9060359 | 0.0 |
| Gastric Cancer 9060395 | 0.0 |
| Stomach Margin 9060394 | 0.0 |
| Gastric Cancer 9060397 | 0.0 |
| Stomach Margin 9060396 | 0.0 |
| Gastric Cancer 064005 | 0.0 |

[0578] TABLE EF
Panel 4D

| Tissue Name | A | B |
|---|---|---|
| Secondary Th1 act | 0.0 | 0.0 |
| Secondary Th2 act | 0.0 | 0.0 |
| Secondary Tr1 act | 0.0 | 0.0 |
| Secondary Th1 rest | 0.0 | 0.0 |
| Secondary Th2 rest | 0.0 | 0.0 |
| Secondary Tr1 rest | 0.0 | 0.0 |
| Primary Th1 act | 0.0 | 0.0 |
| Primary Th2 act | 0.0 | 0.0 |
| Primary Tr1 act | 1.8 | 0.0 |
| Primary Th1 rest | 0.0 | 0.0 |
| Primary Th2 rest | 0.0 | 0.0 |
| Primary Tr1 rest | 0.0 | 0.0 |
| CD45RA CD4 lymphocyte act | 0.0 | 0.0 |
| CD45RO CD4 lymphocyte act | 0.0 | 0.0 |
| CD8 lymphocyte act | 0.0 | 0.0 |
| Secondary CD8 lymphocyte rest | 0.0 | 0.0 |
| Secondary CD8 lymphocyte act | 0.0 | 0.0 |
| CD4 lymphocyte none | 0.0 | 0.0 |
| 2ry Th1/Th2/Tr1_anti-CD95 CH11 | 0.0 | 0.0 |
| LAK cells rest | 0.0 | 0.0 |
| LAK cells IL-2 | 0.0 | 0.0 |
| LAK cells IL-2 + IL-12 | 0.0 | 0.0 |
| LAK cells IL-2 + IFN gamma | 17.3 | 0.0 |
| LAK cells IL-2 + IL-18 | 0.0 | 0.0 |
| LAK cells PMA/ionomycin | 0.0 | 0.0 |
| NK Cells IL-2 rest | 0.0 | 0.0 |
| Two Way MLR 3 day | 0.0 | 0.0 |
| Two Way MLR 5 day | 17.1 | 0.0 |
| Two Way MLR 7 day | 0.0 | 0.0 |
| PBMC rest | 0.0 | 0.0 |
| PBMC PWM | 0.0 | 0.0 |
| PBMC PHA-L | 0.0 | 0.0 |
| Ramos (B cell) none | 0.0 | 0.0 |
| Ramos (B cell) ionomycin | 0.0 | 0.0 |
| B lymphocytes PWM | 0.0 | 0.0 |
| B lymphocytes CD40L and IL-4 | 0.0 | 0.0 |
| EOL-1 dbcAMP | 0.0 | 0.0 |
| EOL-1 dbcAMP PMA/ionomycin | 0.0 | 0.0 |
| Dendritic cells none | 0.0 | 0.0 |
| Dendritic cells LPS | 2.9 | 0.0 |
| Dendritic cells anti-CD40 | 0.0 | 0.0 |
| Monocytes rest | 0.0 | 0.0 |
| Monocytes LPS | 0.0 | 0.0 |
| Macrophages rest | 8.2 | 0.0 |
| Macrophages LPS | 0.0 | 0.0 |
| HUVEC none | 0.0 | 0.0 |
| HUVEC starved | 1.8 | 0.0 |
| HUVEC IL-1beta | 0.0 | 0.0 |
| HUVEC IFN gamma | 0.0 | 0.0 |
| HUVEC TNF alpha + IFN gamma | 11.6 | 0.0 |
| HUVEC TNF alpha + IL4 | 0.0 | 0.0 |
| HUVEC IL-11 | 8.7 | 0.0 |
| Lung Microvascular EC none | 0.0 | 0.0 |
| Lung Microvascular EC TNFalpha + IL-1beta | 0.0 | 0.0 |
| Microvascular Dermal EC none | 0.0 | 0.0 |
| Microsvasular Dermal EC TNFalpha + IL-1beta | 0.0 | 0.0 |
| Bronchial epithelium TNFalpha + IL1beta | 0.0 | 0.0 |
| Small airway epithelium none | 0.0 | 0.0 |
| Small airway epithelium TNFalpha + IL-1beta | 0.0 | 0.0 |
| Coronery artery SMC rest | 0.0 | 0.0 |
| Coronery artery SMC TNFalpha + ILlbeta | 0.0 | 0.0 |
| Astrocytes rest | 0.0 | 0.0 |
| Astrocytes TNFalpha + IL-1beta | 0.0 | 0.0 |
| KU-812 (Basophil) rest | 0.0 | 25.3 |
| KU-812 (Basophil) PMA/ionomycin | 0.0 | 0.0 |
| CCD1106 (Keratinocytes) none | 0.0 | 0.0 |
| CCD1106 (Keratinocytes) TNFalpha + IL-1beta | 0.0 | 0.0 |
| Liver cirrhosis | 0.0 | 0.0 |
| Lupus kidney | 0.0 | 21.9 |
| NCI-H292 none | 0.0 | 0.0 |
| NCI-H292 IL-4 | 0.0 | 0.0 |
| NCI-H292 IL-9 | 0.0 | 0.0 |
| NCI-H292 IL-13 | 0.0 | 0.0 |
| NCI-H292 IFN gamma | 0.0 | 0.0 |
| HPAEC none | 0.0 | 0.0 |
| HPAEC TNFalpha + IL-1beta | 1.3 | 0.0 |
| Lung fibroblast none | 0.0 | 0.0 |
| Lung fibroblast TNF alpha + IL-1beta | 0.0 | 0.0 |
| Lung fibroblast IL-4 | 0.0 | 0.0 |
| Lung fibroblast IL-9 | 0.0 | 0.0 |
| Lung fibroblast IL-13 | 0.0 | 0.0 |
| Lung fibroblast IFN gamma | 0.0 | 0.0 |
| Dermal fibroblast CCD1070 rest | 0.0 | 0.0 |
| Dermal fibroblast CCD1070 TNF alpha | 0.0 | 0.0 |
| Dermal fibroblast CCD1070 IL-1beta | 0.0 | 0.0 |
| Dermal fibroblast IFN gamma | 0.0 | 0.0 |
| Dermal fibroblast IL-4 | 0.0 | 0.0 |
| IBD Colitis 2 | 0.0 | 0.0 |
| IBD Crohn's | 0.0 | 0.0 |
| Colon | 100.0 | 12.7 |
| Lung | 72.2 | 0.0 |
| Thymus | 47.3 | 100.0 |
| Kidney | 0.0 | 0.0 |

Column A - Rel. Exp. (%) Ag2262, Run 150981162
Column B - Rel. Exp. (%) Ag2316, Run 164037437

Ardais Kidney 1.0 Summary: Ag2262 Highest expression of the CG50709-03 and CG50709-05 genes was detected in a normal kidney sample (CT=27.6). In many cases, expression of these genes was higher in normal adjacent kidney samples relative to the tumors. The results from Panel 1.3D indicate that these genes were also more highly expressed in fetal as compared to adult kidney. This expression profile suggests that the function of these genes is to drive and/or maintain differentiation of kidney epithelium, since loss of differentiation is a hallmark of kidney cancer. Gene or protein expression levels are useful to distinguish normal kidney from kidney cancer. Therapeutic modulation of the activity of these genes or their protein products using nucleic acid, protein, antibody, or small molecule drugs is useful in the treatment of kidney cancer.
Panel 1.3D Summary: Ag2262 Significant expression of these genes was seen mainly in spleen and fetal kidney (CTs=30-32) with upregulated expression in fetal relative to adult kidney. Please see Ardias Kidney v1.0 panel for further discussion of these genes.
Panel 2D Summary: Ag2262 Expression of these genes was highest in a sample derived from normal kidney tissue (CT=32.6) and was generally higher in normal kidney tissue relative to adjacent malignant tissue. This expression profile is in agreement with that seen in the Ardias kidney v1.0 panel. Therapeutic modulation of these genes or their protein products using nucleic acid, protein, antibody or small molecule drugs that increase the activity of these genes is useful in the treatment of kidney cancers.
Panel 4D Summary: Ag2316 Significant expression of these genes was seen exclusively in thymus (CT=33). These genes encode variants of a Wnt14B-like protein; other members of this protein family are known to regulate cell differentiation. The encoded Wnt 14-like proteins may play an important role in T cell development. Therapeutic modulation of the activity of these genes or their protein products is useful to modulate immune function (T cell development) and for organ transplant, AIDS treatment or post chemotherapy immune reconstitiution.

[0583] Ag 2262 The Wnt 14B variant recognized by this probe-primer set was significantly expressed in colon, lung and thymus (CT=33-34.7). This gene may play an important role in the normal homeostasis of these tissues. Therapeutic modulation of the activity of this gene or its protein product is useful in maintaining or restoring normal function to these organs during inflammation.

[0584] F. CG53054-02: Wnt-14 Protein Precursor

[0585] Expression of gene CG53054-02 was assessed using the primer-probe sets Ag2261 and Ag3035, described in Tables FA and FB. Results of the RTQ-PCR runs are shown in Tables FC, FD, FE, FF, FG, FH, FI and FJ.

TABLE FA
Probe Name Ag2261

| | | | Start | SEQ ID |
|---|---|---|---|---|
| Primers | Sequences | Length | Position | No |
| Forward | 5′-ggatgactcgcctagct | 20 | 882 | 301 |
| | tct-3′ | | | |
| Probe | TET-5′-gccgtaggtgccac | 23 | 935 | 302 |
| | cgtgagaag-3′-TAMRA | | | |
| Reverse | 5′-agcagatgctctcgca | 19 | 958 | 303 |
| | gtt-3′ | | | |

[0586] TABLE FB
Probe Name Ag3035

| | | | Start | SEQ ID |
|---|---|---|---|---|
| Primers | Sequences | Length | Position | No |
| Forward | 5′-acagcagcaagttcgtc | 20 | 527 | 304 |
| | aag-3′ | | | |
| Probe | TET-5′-agacggtcaagcaa | 25 | 559 | 305 |
| | ggatctgcgag-3′-TAMRA | | | |
| Reverse | 5′-cacgaggttgttgtgga | 20 | 593 | 306 |
| | agt-3′ | | | |

[0587] TABLE FC
AI comprehensive panel v1.0
Column A - Rel. Exp. (%) Ag3035, Run 311087483

| Tissue Name | A |
|---|---|
| 110967 COPD-F | 13.1 |
| 110980 COPD-F | 44.1 |
| 110968 COPD-M | 32.3 |
| 110977 COPD-M | 100.0 |
| 110989 Emphysema-F | 48.0 |
| 110992 Emphysema-F | 28.7 |
| 110993 Emphysema-F | 17.9 |
| 110994 Emphysema-F | 7.4 |
| 110995 Emphysema-F | 50.3 |
| 110996 Emphysema-F | 17.3 |
| 110997 Asthma-M | 1.6 |
| 111001 Asthma-F | 13.1 |
| 111002 Asthma-F | 46.7 |
| 111003 Atopic Asthma-F | 25.3 |
| 111004 Atopic Asthma-F | 44.4 |
| 111005 Atopic Asthma-F | 22.4 |
| 111006 Atopic Asthma-F | 6.9 |
| 111417 Allergy-M | 22.1 |
| 112347 Allergy-M | 2.2 |
| 112349 Normal Lung-F | 0.9 |
| 112357 Normal Lung-F | 76.8 |
| 112354 Normal Lung-M | 11.3 |
| 112374 Crohns-F | 30.1 |
| 112389 Match Control Crohns-F | 20.6 |
| 112375 Crohns-F | 29.9 |
| 112732 Match Control Crohns-F | 14.3 |
| 112725 Crohns-M | 6.4 |
| 112387 Match Control Crohns-M | 18.8 |
| 112378 Crohns-M | 1.6 |
| 112390 Match Control Crohns-M | 25.9 |
| 112726 Crohns-M | 14.1 |
| 112731 Match Control Crohns-M | 25.9 |
| 112380 Ulcer Col-F | 33.0 |
| 112734 Match Control Ulcer Col-F | 19.2 |
| 112384 Ulcer Col-F | 21.8 |
| 112737 Match Control Ulcer Col-F | 3.6 |
| 112386 Ulcer Col-F | 10.8 |
| 112738 Match Control Ulcer Col-F | 25.5 |
| 112381 Ulcer Col-M | 0.2 |
| 112735 Match Control Ulcer Col-M | 1.9 |
| 112382 Ulcer Col-M | 14.4 |
| 112394 Match Control Ulcer Col-M | 3.1 |
| 112383 Ulcer Col-M | 31.6 |
| 112736 Match Control Ulcer Col-M | 11.3 |
| 112423 Psoriasis-F | 7.1 |
| 112427 Match Control Psoriasis-F | 84.1 |
| 112418 Psoriasis-M | 11.5 |
| 112723 Match Control Psoriasis-M | 2.6 |
| 112419 Psoriasis-M | 17.3 |
| 112424 Match Control Psoriasis-M | 9.9 |
| 112420 Psoriasis-M | 45.1 |
| 112425 Match Control Psoriasis-M | 36.1 |
| 104689 (MF) OA Bone-Backus | 16.6 |
| 104690 (MF) Adj “Normal” Bone-Backus | 10.2 |
| 104691 (MF) OA Synovium-Backus | 27.9 |
| 104692 (BA) OA Cartilage-Backus | 0.0 |
| 104694 (BA) OA Bone-Backus | 21.3 |
| 104695 (BA) Adj “Normal” Bone-Backus | 8.1 |
| 104696 (BA) OA Synovium-Backus | 22.1 |
| 104700 (SS) OA Bone-Backus | 6.0 |
| 104701 (SS) Adj “Normal” Bone-Backus | 12.4 |
| 104702 (SS) OA Synovium-Backus | 39.5 |
| 117093 OA Cartilage Rep7 | 21.3 |
| 112672 OA Bone5 | 17.9 |
| 112673 OA Synovium5 | 10.1 |
| 112674 OA Synovial Fluid cells5 | 7.6 |
| 117100 OA Cartilage Rep14 | 12.8 |
| 112756 OA Bone9 | 24.0 |
| 112757 OA Synovium9 | 49.3 |
| 112758 OA Synovial Fluid Cells9 | 5.7 |
| 117125 RA Cartilage Rep2 | 17.3 |
| 113492 Bone2 RA | 25.5 |
| 113493 Synovium2 RA | 6.3 |
| 113494 Syn Fluid Cells RA | 16.8 |
| 113499 Cartilage4 RA | 13.1 |
| 113500 Bone4 RA | 21.8 |
| 113501 Synovium4 RA | 13.9 |
| 113502 Syn Fluid Cells4 RA | 6.8 |
| 113495 Cartilage3 RA | 14.4 |
| 113496 Bone3 RA | 13.9 |
| 113497 Synovium3 RA | 10.0 |
| 113498 Syn Fluid Cells3 RA | 23.0 |
| 117106 Normal Cartilage Rep20 | 15.5 |
| 113663 Bone3 Normal | 0.0 |
| 113664 Synovium3 Normal | 0.0 |
| 113665 Syn Fluid Cells3 Normal | 0.1 |
| 117107 Normal Cartilage Rep22 | 3.6 |
| 113667 Bone4 Normal | 18.3 |
| 113668 Synovium4 Normal | 16.4 |
| 113669 Syn Fluid Cells4 Normal | 43.8 |

[0588] TABLE FD
Oncology cell line screening panel v3.2
Column A - Rel. Exp. (%) Ag3035, Run 259180377

| Tissue Name | A |
|---|---|
| 94905_Daoy_Medulloblastoma/Cerebellum_sscDNA | 0.2 |
| 94906_TE671_Medulloblastom/Cerebellum_sscDNA | 0.5 |
| 94907_D283 | 0.2 |
| Med_Medulloblastoma/Cerebellum_sscDNA | |
| 94908_PFSK-1_Primitive | 0.0 |
| Neuroectodermal/Cerebellum_sscDNA | |
| 94909_XF-498_CNS_sscDNA | 0.2 |
| 94910_SNB-78_CNS/glioma_sscDNA | 0.5 |
| 94911_SF-268_CNS/glioblastoma_sscDNA | 0.3 |
| 94912_T98G_Glioblastoma_sscDNA | 0.5 |
| 96776_SK-N-SH_Neuroblastoma | 0.0 |
| (metastasis)_sscDNA | |
| 94913_SF-295_CNS/glioblastoma_sscDNA | 0.6 |
| 132565_NT2 pool_sscDNA | 3.9 |
| 94914_Cerebellum_sscDNA | 0.7 |
| 96777_Cerebellum_sscDNA | 0.8 |
| 94916_NCI-H292_Mucoepidermoid lung | 11.7 |
| carcinoma_sscDNA | |
| 94917_DMS-114_Small cell lung | 0.3 |
| cancer_sscDNA | |
| 94918_DMS-79_Small cell lung | 100.0 |
| cancer/neuroendocrine_sscDNA | |
| 94919_NCI-H146_Small cell lung | 16.4 |
| cancer/neuroendocrine_sscDNA | |
| 94920_NCI-H526_Small cell lung | 0.0 |
| cancer/neuroendocrine_sscDNA | |
| 94921_NCI-N417_Small cell lung | 0.0 |
| cancer/neuroendocrine_sscDNA | |
| 94923_NCI-H82_Small cell lung | 0.4 |
| cancer/neuroendocrine_sscDNA | |
| 94924_NCI-H157_Squamous cell lung cancer | 2.4 |
| (metastasis)_sscDNA | |
| 94925_NCI-H1155_Large cell lung | 15.5 |
| cancer/neuroendocrine_sscDNA | |
| 94926_NCI-H1299_Large cell lung | 3.4 |
| cancer/neuroendocrine_sscDNA | |
| 94927_NCI-H727_Lung carcinoid_sscDNA | 9.5 |
| 94928_NCI-UMC-11_Lung carcinoid_sscDNA | 20.2 |
| 94929_LX-1_Small cell lung cancer_sscDNA | 0.0 |
| 94930_Colo-205_Colon cancer_sscDNA | 0.0 |
| 94931_KM12_Colon cancer_sscDNA | 0.0 |
| 94932_KM20L2_Colon cancer_sscDNA | 0.0 |
| 94933_NCI-H716_Colon cancer_sscDNA | 4.3 |
| 94935_SW-48_Colon adenocarcinoma_sscDNA | 0.0 |
| 94936_SW1116_Colon | 1.2 |
| adenocarcinoma_sscDNA | |
| 94937_LS 174T_Colon | 0.6 |
| adenocarcinoma_sscDNA | |
| 94938_SW-948_Colon | 0.0 |
| adenocarcinoma_sscDNA | |
| 94939_SW-480_Colon | 0.0 |
| adenocarcinoma_sscDNA | |
| 94940_NCI-SNU-5_Gastric carcinoma_sscDNA | 6.9 |
| 112197_KATO III_Stomach_sscDNA | 0.3 |
| 94943_NCI-SNU-16_Gastric | 0.6 |
| carcinoma_sscDNA | |
| 94944_NCI-SNU-1_Gastric carcinoma_sscDNA | 2.9 |
| 94946_RF-1_Gastric adenocarcinoma_sscDNA | 0.0 |
| 94947_RF-48_Gastric | 0.0 |
| adenocarcinoma_sscDNA | |
| 96778_MKN-45_Gastric carcinoma_sscDNA | 0.6 |
| 94949_NCI-N87_Gastric carcinoma_sscDNA | 3.9 |
| 94951_OVCAR-5_Ovarian carcinoma_sscDNA | 1.3 |
| 94952_RL95-2_Uterine carcinoma_sscDNA | 3.0 |
| 94953_HelaS3_Cervical | 1.7 |
| adenocarcinoma_sscDNA | |
| 94954_Ca Ski_Cervical epidermoid | 8.4 |
| carcinoma (metastasis)_sscDNA | |
| 94955_ES-2_Ovarian clear cell | 0.0 |
| carcinoma_sscDNA | |
| 94957_Ramos/6 h stim_Stimulated with | 0.0 |
| PMA/ionomycin 6 h_sscDNA | |
| 94958_Ramos/14 h stim_Stimulated | 0.0 |
| with PMA/ionomycin 14 h_sscDNA | |
| 94962_MEG-01_Chronic myelogenous | 0.0 |
| leukemia (megokaryoblast)_sscDNA | |
| 94963_Raji_Burkitt's | 0.0 |
| lymphoma_sscDNA | |
| 94964_Daudi_Burkitt's | 0.0 |
| lymphoma_sscDNA | |
| 94965_U266_B-cell | 0.0 |
| plasmacytoma/myeloma_sscDNA | |
| 94968_CA46_Burkitt's | 0.0 |
| lymphoma_sscDNA | |
| 94970_RL_non-Hodgkin's B-cell | 0.0 |
| lymphoma_sscDNA | |
| 94972_JM1_pre-B-cell | 1.1 |
| lymphoma/leukemia_sscDNA | |
| 94973_Jurkat_T cell leukemia_sscDNA | 0.0 |
| 94974_TF-1_Erythroleukemia_sscDNA | 0.0 |
| 94975_HUT 78_T-cell | 0.1 |
| lymphoma_sscDNA | |
| 94977_U937_Histiocytic | 0.0 |
| lymphoma_sscDNA | |
| 94980_KU-812_Myelogenous | 1.3 |
| leukemia_sscDNA | |
| 94981_769-P_Clear cell renal | 1.9 |
| carcinoma_sscDNA | |
| 94983_Caki-2_Clear cell renal | 1.8 |
| carcinoma_sscDNA | |
| 94984_SW 839_Clear cell renal | 0.8 |
| carcinoma_sscDNA | |
| 94986_G401_Wilms' tumor_sscDNA | 0.4 |
| 126768_293 cells_sscDNA | 1.9 |
| 94987_Hs766T_Pancreatic carcinoma | 2.1 |
| (LN metastasis)_sscDNA | |
| 94988_CAPAN-1_Pancreatic | 3.2 |
| adenocarcinoma (liver | |
| metastasis)_sscDNA | |
| 94989_SU86.86_Pancreatic carcinoma | 1.6 |
| (liver metastasis)_sscDNA | |
| 94990_BxPC-3_Pancreatic | 3.0 |
| adenocarcinoma_sscDNA | |
| 94991_HPAC_Pancreatic | 0.9 |
| adenocarcinoma_sscDNA | |
| 94992_MIA PaCa-2_Pancreatic | 1.1 |
| carcinoma_sscDNA | |
| 94993_CFPAC-1_Pancreatic ductal | 0.2 |
| adenocarcinoma_sscDNA | |
| 94994_PANC-1_Pancreatic epithelioid | 22.8 |
| ductal carcinoma_sscDNA | |
| 94996_T24_Bladder carcinma | 0.2 |
| (transitional cell)_sscDNA | |
| 94997_5637_Bladder | 0.5 |
| carcinoma_sscDNA | |
| 94998_HT-1197_Bladder | 12.5 |
| carcinoma_sscDNA | |
| 94999_UM-UC-3_Bladder carcinma | 0.0 |
| (transitional cell)_sscDNA | |
| 95000_A204_Rhabdomyosarcoma_{—} | 0.0 |
| sscDNA | |
| 95001_HT-1080_Fibrosarcoma_sscDNA | 1.6 |
| 95002_MG-63_Osteosarcoma | 14.7 |
| (bone)_sscDNA | |
| 95003_SK-LMS-1_Leiomyosarcoma | 0.0 |
| (vulva)_sscDNA | |
| 95004_SJRH30_Rhabdomyosarcoma | 1.3 |
| (met to bone marrow)_sscDNA | |
| 95005_A431_Epidermoid | 5.9 |
| carcinoma_sscDNA | |
| 95007_WM266-4_Melanoma_sscDNA | 0.0 |
| 112195_DU 145_Prostate_sscDNA | 1.1 |
| 95012_MDA-MB-468_Breast | 2.2 |
| adenocarcinoma_sscDNA | |
| 112196_SSC-4_Tongue_sscDNA | 2.6 |
| 112194_SSC-9_Tongue_sscDNA | 3.3 |
| 112191_SSC-15_Tongue_sscDNA | 1.8 |
| 95017_CAL 27_Squamous cell | 1.2 |
| carcinoma of tongue_sscDNA | |

[0589] TABLE FE
Panel 1.3D

| Tissue Name | A | B | C |
|---|---|---|---|
| Liver adenocarcinoma | 22.4 | 19.6 | 71.2 |
| Pancreas | 3.9 | 2.5 | 2.8 |
| Pancreatic ca. CAPAN 2 | 5.3 | 3.5 | 9.5 |
| Adrenal gland | 2.1 | 0.6 | 2.0 |
| Thyroid | 7.0 | 9.8 | 3.9 |
| Salivary gland | 1.9 | 2.1 | 4.2 |
| Pituitary gland | 1.0 | 2.2 | 6.7 |
| Brain (fetal) | 6.8 | 4.9 | 10.8 |
| Brain (whole) | 4.8 | 3.0 | 1.4 |
| Brain (amygdala) | 4.6 | 5.3 | 1.5 |
| Brain (cerebellum) | 1.6 | 1.6 | 2.0 |
| Brain (hippocampus) | 7.5 | 11.3 | 0.6 |
| Brain (substantia nigra) | 1.2 | 2.6 | 1.3 |
| Brain (thalamus) | 2.5 | 1.7 | 2.6 |
| Cerebral Cortex | 0.0 | 0.0 | 5.0 |
| Spinal cord | 1.7 | 2.1 | 2.7 |
| glio/astro U87-MG | 0.0 | 0.0 | 0.0 |
| glio/astro U-118-MG | 55.1 | 50.3 | 42.9 |
| astrocytoma SW1783 | 0.0 | 7.5 | 0.0 |
| neuro*; met SK-N-AS | 0.0 | 0.0 | 0.7 |
| astrocytoma SF-539 | 1.9 | 4.7 | 9.9 |
| astrocytoma SNB-75 | 2.0 | 4.9 | 6.9 |
| glioma SNB-19 | 6.7 | 2.4 | 3.7 |
| glioma U251 | 2.1 | 4.5 | 6.8 |
| glioma SF-295 | 10.0 | 0.6 | 4.6 |
| Heart (fetal) | 11.1 | 9.9 | 38.2 |
| Heart | 4.9 | 6.0 | 15.2 |
| Skeletal muscle (fetal) | 100.0 | 100.0 | 85.3 |
| Skeletal muscle | 5.5 | 8.4 | 39.8 |
| Bone marrow | 0.0 | 0.0 | 0.7 |
| Thymus | 10.0 | 3.9 | 6.4 |
| Spleen | 3.8 | 4.2 | 1.6 |
| Lymph node | 5.0 | 1.1 | 1.4 |
| Colorectal | 3.4 | 5.4 | 6.8 |
| Stomach | 6.0 | 15.4 | 3.1 |
| Small intestine | 15.9 | 18.7 | 2.3 |
| Colon ca. SW480 | 24.3 | 15.3 | 11.6 |
| Colon ca.* SW620(SW480 met) | 0.0 | 0.0 | 2.1 |
| Colon ca. HT29 | 0.0 | 0.0 | 0.0 |
| Colon ca. HCT-116 | 3.8 | 0.6 | 3.3 |
| Colon ca. CaCo-2 | 0.0 | 0.8 | 0.3 |
| Colon ca. tissue(ODO3866) | 2.3 | 0.0 | 1.6 |
| Colon ca. HCC-2998 | 0.0 | 0.0 | 1.6 |
| Gastric ca.* (liver met) | 16.7 | 14.9 | 15.3 |
| NCI-N87 | | | |
| Bladder | 1.6 | 3.2 | 3.0 |
| Trachea | 24.3 | 33.7 | 5.7 |
| Kidney | 0.0 | 0.0 | 0.0 |
| Kidney (fetal) | 2.1 | 0.0 | 2.7 |
| Renal ca. 786-0 | 0.0 | 0.0 | 0.0 |
| Renal ca. A498 | 10.2 | 5.3 | 9.2 |
| Renal ca. RXF 393 | 0.0 | 0.0 | 0.0 |
| Renal ca. ACHN | 0.0 | 2.2 | 0.0 |
| Renal ca. UO-31 | 0.0 | 0.0 | 0.0 |
| Renal ca. TK-10 | 0.0 | 0.0 | 0.0 |
| Liver | 0.0 | 0.0 | 0.0 |
| Liver (fetal) | 7.6 | 0.0 | 0.0 |
| Liver ca. (hepatoblast) HepG2 | 0.0 | 0.0 | 0.0 |
| Lung | 14.3 | 15.8 | 9.2 |
| Lung (fetal) | 15.1 | 15.4 | 7.4 |
| Lung ca. (small cell) LX-1 | 1.6 | 0.0 | 0.0 |
| Lung ca. (small cell) NCI-H69 | 29.5 | 19.1 | 31.2 |
| Lung ca. (s. cell var.) SHP-77 | 11.0 | 5.1 | 37.4 |
| Lung ca. (large cell) NCI-H460 | 0.0 | 0.0 | 0.0 |
| Lung ca. (non-sm. cell) A549 | 0.0 | 1.2 | 1.6 |
| Lung ca. (non-s. cell) NCI-H23 | 0.0 | 1.3 | 0.8 |
| Lung ca. (non-s. cell) HOP-62 | 0.0 | 1.7 | 0.0 |
| Lung ca. (non-s. cl) NCI-H522 | 8.0 | 8.3 | 7.3 |
| Lung ca. (squam.) SW 900 | 4.0 | 0.0 | 1.8 |
| Lung ca. (squam.) NCI-H596 | 15.8 | 10.2 | 58.2 |
| Mammary gland | 7.2 | 4.1 | 4.4 |
| Breast ca.* (pl. ef) MCF-7 | 1.7 | 3.4 | 7.3 |
| Breast ca.* (pl. ef) MDA-MB-231 | 23.2 | 19.6 | 19.2 |
| Breast ca.* (pl. ef) T47D | 4.3 | 5.8 | 21.8 |
| Breast ca. BT-549 | 0.0 | 4.2 | 2.2 |
| Breast ca. MDA-N | 0.0 | 0.0 | 0.0 |
| Ovary | 3.6 | 3.1 | 8.1 |
| Ovarian ca. OVCAR-3 | 1.1 | 1.0 | 5.6 |
| Ovarian ca. OVCAR-4 | 0.0 | 0.0 | 0.7 |
| Ovarian ca. OVCAR-5 | 0.0 | 0.0 | 11.5 |
| Ovarian ca. OVCAR-8 | 1.3 | 4.3 | 4.1 |
| Ovarian ca. IGROV-1 | 0.0 | 0.0 | 8.1 |
| Ovarian ca.* (ascites) SK-OV-3 | 7.5 | 16.0 | 100.0 |
| Uterus | 17.8 | 15.1 | 9.9 |
| Placenta | 4.6 | 8.2 | 2.1 |
| Prostate | 3.6 | 5.3 | 0.6 |
| Prostate ca.* (bone met) PC-3 | 1.7 | 1.5 | 6.1 |
| Testis | 21.9 | 14.6 | 1.6 |
| Melanoma Hs688(A).T | 3.1 | 4.7 | 1.4 |
| Melanoma* (met) Hs688(B).T | 0.4 | 1.3 | 0.0 |
| Melanoma UACC-62 | 0.0 | 0.0 | 0.0 |
| Melanoma M14 | 0.0 | 0.0 | 0.0 |
| Melanoma LOX IMVI | 0.0 | 0.0 | 0.0 |
| Melanoma* (met) SK-MEL-5 | 0.0 | 2.0 | 0.7 |
| Adipose | 6.7 | 7.2 | 21.2 |

Column A - Rel. Exp. (%) Ag2261, Run 150631675
Column B - Rel. Exp. (%) Ag2261, Run 152887692
Column C - Rel. Exp. (%) Ag3035, Run 167597764

[0590] TABLE FF
Panel 2D

| Tissue Name | A | B |
|---|---|---|
| Normal Colon | 19.1 | 19.8 |
| CC Well to Mod Diff (ODO3866) | 0.0 | 5.8 |
| CC Margin (ODO3866) | 19.5 | 12.5 |
| CC Gr.2 rectosigmoid (ODO3868) | 3.8 | 1.4 |
| CC Margin (ODO3868) | 2.6 | 5.1 |
| CC Mod Diff (ODO3920) | 6.0 | 2.9 |
| CC Margin (ODO3920) | 23.8 | 6.4 |
| CC Gr.2 ascend colon (ODO3921) | 9.3 | 2.2 |
| CC Margin (ODO3921) | 16.8 | 11.7 |
| CC from Partial Hepatectomy | 2.4 | 0.0 |
| (ODO4309) Mets | | |
| Liver Margin (ODO4309) | 2.6 | 0.0 |
| Colon mets to lung (OD04451-01) | 7.9 | 4.5 |
| Lung Margin (OD04451-02) | 11.3 | 12.9 |
| Normal Prostate 6546-1 | 6.3 | 2.6 |
| Prostate Cancer (OD04410) | 17.8 | 7.3 |
| Prostate Margin (OD04410) | 10.7 | 7.4 |
| Prostate Cancer (OD04720-01) | 4.7 | 4.4 |
| Prostate Margin (OD04720-02) | 13.9 | 5.6 |
| Normal Lung 061010 | 36.6 | 14.3 |
| Lung Met to Muscle (ODO4286) | 1.0 | 0.0 |
| Muscle Margin (ODO4286) | 31.0 | 38.2 |
| Lung Malignant Cancer (OD03126) | 81.8 | 100.0 |
| Lung Margin (OD03126) | 35.8 | 18.2 |
| Lung Cancer (OD04404) | 57.0 | 39.5 |
| Lung Margin (OD04404) | 9.4 | 11.8 |
| Lung Cancer (OD04565) | 37.1 | 42.0 |
| Lung Margin (OD04565) | 22.7 | 9.3 |
| Lung Cancer (OD04237-01) | 5.3 | 6.4 |
| Lung Margin (OD04237-02) | 78.5 | 32.8 |
| Ocular Mel Met to Liver (ODO4310) | 0.0 | 0.0 |
| Liver Margin (ODO4310) | 2.4 | 0.0 |
| Melanoma Mets to Lung (OD04321) | 13.0 | 0.0 |
| Lung Margin (OD04321) | 96.6 | 50.0 |
| Normal Kidney | 0.0 | 0.0 |
| Kidney Ca, Nuclear grade 2 (OD04338) | 0.0 | 0.0 |
| Kidney Margin (OD04338) | 4.0 | 4.6 |
| Kidney Ca Nuclear grade 1/2 (OD04339) | 0.0 | 3.3 |
| Kidney Margin (OD04339) | 18.7 | 0.0 |
| Kidney Ca, Clear cell type (OD04340) | 8.8 | 11.7 |
| Kidney Margin (OD04340) | 0.0 | 2.0 |
| Kidney Ca, Nuclear grade 3 (OD04348) | 3.5 | 4.0 |
| Kidney Margin (OD04348) | 2.0 | 1.7 |
| Kidney Cancer (OD04622-01) | 9.3 | 0.0 |
| Kidney Margin (OD04622-03) | 0.0 | 6.3 |
| Kidney Cancer (OD04450-01) | 0.0 | 0.0 |
| Kidney Margin (OD04450-03) | 0.0 | 0.0 |
| Kidney Cancer 8120607 | 0.0 | 0.7 |
| Kidney Margin 8120608 | 2.4 | 0.0 |
| Kidney Cancer 8120613 | 14.6 | 7.3 |
| Kidney Margin 8120614 | 4.8 | 1.5 |
| Kidney Cancer 9010320 | 0.0 | 0.0 |
| Kidney Margin 9010321 | 0.0 | 0.0 |
| Normal Uterus | 9.7 | 2.8 |
| Uterus Cancer 064011 | 85.9 | 41.5 |
| Normal Thyroid | 15.2 | 7.3 |
| Thyroid Cancer 064010 | 0.0 | 3.0 |
| Thyroid Cancer A302152 | 1.9 | 1.2 |
| Thyroid Margin A302153 | 2.6 | 2.8 |
| Normal Breast | 16.2 | 2.7 |
| Breast Cancer (OD04566) | 78.5 | 29.7 |
| Breast Cancer (OD04590-01) | 37.6 | 23.8 |
| Breast Cancer Mets (OD04590-03) | 100.0 | 24.5 |
| Breast Cancer Metastasis (OD04655-05) | 94.0 | 45.4 |
| Breast Cancer 064006 | 25.7 | 24.8 |
| Breast Cancer 1024 | 23.2 | 7.1 |
| Breast Cancer 9100266 | 33.0 | 7.5 |
| Breast Margin 9100265 | 7.6 | 7.6 |
| Breast Cancer A209073 | 13.9 | 0.9 |
| Breast Margin A209073 | 2.5 | 0.0 |
| Normal Liver | 0.0 | 0.0 |
| Liver Cancer 064003 | 0.0 | 0.0 |
| Liver Cancer 1025 | 4.8 | 1.7 |
| Liver Cancer 1026 | 7.1 | 0.0 |
| Liver Cancer 6004-T | 4.8 | 0.0 |
| Liver Tissue 6004-N | 4.4 | 1.8 |
| Liver Cancer 6005-T | 0.0 | 6.0 |
| Liver Tissue 6005-N | 0.0 | 1.8 |
| Normal Bladder | 2.4 | 3.0 |
| Bladder Cancer 1023 | 8.5 | 4.9 |
| Bladder Cancer A302173 | 17.0 | 11.8 |
| Bladder Cancer (OD04718-01) | 10.0 | 5.7 |
| Bladder Normal Adjacent (OD04718-03) | 19.3 | 27.5 |
| Normal Ovary | 13.6 | 12.4 |
| Ovarian Cancer 064008 | 37.9 | 2.1 |
| Ovarian Cancer (OD04768-07) | 18.4 | 3.7 |
| Ovary Margin (OD04768-08) | 28.3 | 12.2 |
| Normal Stomach | 48.3 | 17.3 |
| Gastric Cancer 9060358 | 0.0 | 0.0 |
| Stomach Margin 9060359 | 9.9 | 3.0 |
| Gastric Cancer 9060395 | 20.7 | 10.4 |
| Stomach Margin 9060394 | 10.0 | 12.2 |
| Gastric Cancer 9060397 | 8.7 | 1.5 |
| Stomach Margin 9060396 | 7.5 | 6.2 |
| Gastric Cancer 064005 | 10.7 | 4.8 |

Column A - Rel. Exp. (%) Ag2261, Run 150811744
Column B - Rel. Exp. (%) Ag2261, Run 152887693

[0591] TABLE FG
Panel 4.1D

| Tissue Name | A | B |
|---|---|---|
| Secondary Th1 act | 0.0 | 0.0 |
| Secondary Th2 act | 0.0 | 0.0 |
| Secondary Tr1 act | 0.0 | 0.0 |
| Secondary Th1 rest | 0.0 | 0.0 |
| Secondary Th2 rest | 0.0 | 2.0 |
| Secondary Tr1 rest | 0.0 | 0.0 |
| Primary Th1 act | 0.0 | 0.0 |
| Primary Th2 act | 0.0 | 0.0 |
| Primary Tr1 act | 0.0 | 0.0 |
| Primary Th1 rest | 0.0 | 0.0 |
| Primary Th2 rest | 0.0 | 0.0 |
| Primary Tr1 rest | 0.0 | 0.0 |
| CD45RA CD4 lymphocyte act | 0.0 | 2.3 |
| CD45RO CD4 lymphocyte act | 0.0 | 0.0 |
| CD8 lymphocyte act | 0.0 | 0.0 |
| Secondary CD8 lymphocyte rest | 0.0 | 0.0 |
| Secondary CD8 lymphocyte act | 0.0 | 0.0 |
| CD4 lymphocyte none | 0.0 | 0.0 |
| 2ry Th1/Th2/Tr1_anti-CD95 | 0.0 | 0.0 |
| CH11 | | |
| LAK cells rest | 0.0 | 4.7 |
| LAK cells IL-2 | 0.0 | 0.0 |
| LAK cells IL-2 + IL-12 | 0.0 | 0.0 |
| LAK cells IL-2 + IFN gamma | 0.0 | 0.0 |
| LAK cells IL-2 + IL-18 | 0.0 | 3.0 |
| LAK cells PMA/ionomycin | 11.0 | 42.0 |
| NK Cells IL-2 rest | 0.0 | 5.2 |
| Two Way MLR 3 day | 0.0 | 0.0 |
| Two Way MLR 5 day | 0.0 | 0.0 |
| Two Way MLR 7 day | 0.0 | 0.0 |
| PBMC rest | 0.0 | 0.0 |
| PBMC PWM | 0.5 | 0.0 |
| PBMC PHA-L | 0.4 | 0.0 |
| Ramos (B cell) none | 0.0 | 0.0 |
| Ramos (B cell) ionomycin | 0.0 | 0.0 |
| B lymphocytes PWM | 0.0 | 0.0 |
| B lymphocytes CD40L and IL-4 | 0.0 | 0.0 |
| EOL-1 dbcAMP | 0.0 | 2.7 |
| EOL-1 dbcAMP PMA/ionomycin | 1.0 | 1.7 |
| Dendritic cells none | 0.0 | 0.0 |
| Dendritic cells LPS | 0.0 | 0.0 |
| Dendritic cells anti-CD40 | 0.0 | 0.0 |
| Monocytes rest | 0.0 | 0.0 |
| Monocytes LPS | 0.6 | 0.0 |
| Macrophages rest | 0.0 | 0.0 |
| Macrophages LPS | 0.0 | 0.0 |
| HUVEC none | 2.4 | 7.6 |
| HUVEC starved | 8.8 | 22.1 |
| HUVEC IL-1beta | 1.7 | 0.0 |
| HUVEC IFN gamma | 0.8 | 11.8 |
| HUVEC TNF alpha + IFN gamma | 0.2 | 0.0 |
| HUVEC TNF alpha + IL4 | 0.6 | 4.5 |
| HUVEC IL-11 | 1.1 | 17.2 |
| Lung Microvascular EC none | 2.7 | 7.2 |
| Lung Microvascular EC TNFalpha 4 + IL-1beta | 0.6 | 0.0 |
| Microvascular Dermal EC none | 3.8 | 0.0 |
| Microsvasular Dermal EC TNFalpha + IL-1beta | 1.2 | 0.0 |
| Bronchial epithelium TNFalpha + IL1beta | 3.7 | 5.0 |
| Small airway epithelium none | 1.9 | 10.7 |
| Small airway epithelium TNFalpha + | 4.0 | 24.5 |
| IL-1beta | | |
| Coronery artery SMC rest | 0.2 | 2.2 |
| Coronery artery SMC TNFalpha + | 0.0 | 0.0 |
| IL-1beta | | |
| Astrocytes rest | 2.4 | 7.9 |
| Astrocytes TNFalpha + IL-1beta | 1.3 | 0.0 |
| KU-812 (Basophil) rest | 0.0 | 2.3 |
| KU-812 (Basophil) PMA/ionomycin | 2.1 | 4.5 |
| CCD1106 (Keratinocytes) none | 22.2 | 100.0 |
| CCD1106 (Keratinocytes) TNFalpha + IL-1beta | 18.8 | 52.5 |
| Liver cirrhosis | 0.7 | 4.2 |
| NCI-H292 none | 0.4 | 0.0 |
| NCI-H292 IL-4 | 1.5 | 0.0 |
| NCI-H292 IL-9 | 2.0 | 8.8 |
| NCI-H292 IL-13 | 1.4 | 17.8 |
| NCI-H292 IFN gamma | 1.5 | 6.9 |
| HPAEC none | 3.1 | 18.7 |
| HPAEC TNF alpha + IL-1beta | 0.5 | 0.0 |
| Lung fibroblast none | 6.2 | 29.9 |
| Lung fibroblast TNF alpha + IL-1beta | 2.1 | 0.0 |
| Lung fibroblast IL-4 | 4.2 | 9.8 |
| Lung fibroblast IL-9 | 8.3 | 25.3 |
| Lung fibroblast IL-13 | 4.0 | 3.9 |
| Lung fibroblast IFN gamma | 8.1 | 59.5 |
| Dermal fibroblast CCD1070 rest | 0.4 | 0.0 |
| Dermal fibroblast CCD1070 TNF alpha | 0.9 | 4.1 |
| Dermal fibroblast CCD1070 IL-1 beta | 2.9 | 0.0 |
| Dermal fibroblast IFN gamma | 5.8 | 41.8 |
| Dermal fibroblast IL-4 | 17.2 | 62.4 |
| Dermal Fibroblasts rest | 4.8 | 12.9 |
| Neutrophils TNFa + LPS | 1.0 | 0.0 |
| Neutrophils rest | 2.2 | 2.3 |
| Colon | 2.6 | 0.0 |
| Lung | 8.8 | 0.0 |
| Thymus | 17.1 | 1.8 |
| Kidney | 100.0 | 0.0 |

Column A - Rel. Exp. (%) Ag3035, Run 190944495
Column B - Rel. Exp. (%) Ag3035, Run 259180379

[0592] TABLE FH
Panel 4D

| Tissue Name | A | B |
|---|---|---|
| Secondary Th1 act | 0.0 | 2.1 |
| Secondary Th2 act | 0.0 | 0.0 |
| Secondary Tr1 act | 0.0 | 4.2 |
| Secondary Th1 rest | 0.0 | 0.0 |
| Secondary Th2 rest | 0.0 | 2.3 |
| Secondary Tr1 rest | 0.0 | 0.0 |
| Primary Th1 act | 0.0 | 0.0 |
| Primary Th2 act | 0.0 | 0.0 |
| Primary Tr1 act | 0.0 | 0.0 |
| Primary Th1 rest | 0.0 | 0.0 |
| Primary Th2 rest | 0.0 | 0.0 |
| Primary Tr1 rest | 0.0 | 0.0 |
| CD45RA CD4 lymphocyte act | 0.0 | 0.0 |
| CD45RO CD4 lymphocyte act | 0.0 | 0.0 |
| CD8 lymphocyte act | 0.0 | 0.0 |
| Secondary CD8 lymphocyte rest | 0.0 | 0.7 |
| Secondary CD8 lymphocyte act | 1.6 | 0.0 |
| CD4 lymphocyte none | 0.0 | 0.0 |
| 2ry Th1/Th2/Tr1_anti-CD95 CH11 | 0.0 | 1.4 |
| LAK cells rest | 3.5 | 0.0 |
| LAK cells IL-2 | 0.0 | 0.0 |
| LAK cells IL-2 + IL-12 | 0.0 | 0.0 |
| LAK cells IL-2 + IFN gamma | 0.0 | 4.0 |
| LAK cells IL-2 + IL-18 | 0.0 | 0.0 |
| LAK cells PMA/ionomycin | 26.1 | 50.7 |
| NK Cells IL-2 rest | 0.0 | 0.0 |
| Two Way MLR 3 day | 0.0 | 0.0 |
| Two Way MLR 5 day | 0.0 | 0.0 |
| Two Way MLR 7 day | 0.0 | 0.0 |
| PBMC rest | 0.0 | 0.0 |
| PBMC PWM | 0.0 | 0.0 |
| PBMC PHA-L | 0.0 | 0.0 |
| Ramos (B cell) none | 0.0 | 0.0 |
| Ramos (B cell) ionomycin | 0.0 | 0.0 |
| B lymphocytes PWM | 0.0 | 0.0 |
| B lymphocytes CD40L and IL-4 | 3.1 | 0.0 |
| EOL-1 dbcAMP | 0.0 | 0.0 |
| EOL-1 dbcAMP PMA/ionomycin | 3.5 | 2.7 |
| Dendritic cells none | 0.0 | 0.0 |
| Dendritic cells LPS | 0.0 | 0.0 |
| Dendritic cells anti-CD40 | 0.0 | 0.0 |
| Monocytes rest | 0.0 | 0.0 |
| Monocytes LPS | 0.0 | 0.0 |
| Macrophages rest | 0.0 | 0.0 |
| Macrophages LPS | 0.0 | 0.0 |
| HUVEC none | 0.0 | 17.7 |
| HUVEC starved | 17.4 | 51.1 |
| HUVEC IL-1beta | 0.0 | 1.7 |
| HUVEC IFN gamma | 3.7 | 11.5 |
| HUVEC TNF alpha + IFN gamma | 0.0 | 3.1 |
| HUVEC TNF alpha + IL4 | 4.3 | 5.1 |
| HUVEC IL-11 | 4.0 | 11.2 |
| Lung Microvascular EC none | 7.2 | 8.1 |
| Lung Microvascular EC TNFalpha + IL-1beta | 0.0 | 0.0 |
| Microvascular Dermal EC none | 8.4 | 14.5 |
| Microsvasular Dermal EC TNFalpha + IL-1beta | 0.0 | 2.2 |
| Bronchial epithelium TNFalpha + IL1beta | 0.0 | 16.3 |
| Small airway epithelium none | 5.9 | 18.8 |
| Small airway epithelium TNFalpha + IL-1beta | 24.3 | 58.6 |
| Coronery artery SMC rest | 0.0 | 2.0 |
| Coronery artery SMC TNFalpha + IL-1beta | 0.0 | 0.0 |
| Astrocytes rest | 3.3 | 13.5 |
| Astrocytes TNFalpha + IL-1beta | 0.0 | 8.6 |
| KU-812 (Basophil) rest | 0.0 | 0.0 |
| KU-812 (Basophil) PMA/ionomycin | 0.0 | 9.7 |
| CCD1106 (Keratinocytes) none | 47.3 | 100.0 |
| CCD1106 (Keratinocytes) TNFalpha + IL-1beta | 9.0 | 53.6 |
| Liver cirrhosis | 32.8 | 9.4 |
| Lupus kidney | 0.0 | 1.6 |
| NCI-H292 none | 3.8 | 3.4 |
| NCI-H292 IL-4 | 8.0 | 19.5 |
| NCI-H292 IL-9 | 0.0 | 4.2 |
| NCI-H292 IL-13 | 13.8 | 7.0 |
| NCI-H292 IFN gamma | 16.2 | 5.7 |
| HPAEC none | 6.7 | 30.1 |
| HPAEC TNF alpha + IL-1beta | 0.0 | 0.0 |
| Lung fibroblast none | 7.6 | 42.0 |
| Lung fibroblast TNFalpha + IL-1beta | 3.1 | 6.3 |
| Lung fibroblast IL-4 | 4.3 | 34.2 |
| Lung fibroblast IL-9 | 12.7 | 27.5 |
| Lung fibroblast IL-13 | 6.8 | 19.9 |
| Lung fibroblast IFN gamma | 30.4 | 51.1 |
| Dermal fibroblast CCD1070 rest | 0.0 | 2.8 |
| Dermal fibroblast CCD1070 TNF alpha | 5.2 | 19.6 |
| Dermal fibroblast CCD1070 IL-1 beta | 0.0 | 2.0 |
| Dermal fibroblast IFN gamma | 28.5 | 32.1 |
| Dermal fibroblast IL-4 | 42.9 | 91.4 |
| IBD Colitis 2 | 2.2 | 5.5 |
| IBD Crohn's | 3.1 | 9.6 |
| Colon | 100.0 | 58.6 |
| Lung | 36.3 | 26.1 |
| Thymus | 0.0 | 0.0 |
| Kidney | 4.0 | 33.0 |

Column A - Rel. Exp. (%) Ag2261, Run 152887762
Column B - Rel. Exp. (%) Ag3035, Run 165242424

[0593] TABLE FI
Panel 5 Islet
Column A - Rel. Exp. (%) Ag3035, Run 259234350

| Tissue Name | A |
|---|---|
| 97457_Patient-02go_adipose | 19.3 |
| 97476_Patient-07sk_skeletal muscle | 13.0 |
| 97477_Patient-07ut_uterus | 5.3 |
| 97478_Patient-07pl_placenta | 1.4 |
| 99167_Bayer Patient 1 | 89.5 |
| 97482_Patient-08ut_uterus | 9.6 |
| 97483_Patient-08pl_placenta | 7.4 |
| 97486_Patient-09sk_skeletal muscle | 10.7 |
| 97487_Patient-09ut_uterus | 4.7 |
| 97488_Patient-09pl_placenta | 3.6 |
| 97492_Patient-10ut_uterus | 6.1 |
| 97493_Patient-10pl_placenta | 6.8 |
| 97495_Patient-11go_adipose | 1.6 |
| 97496_Patient-11sk_skeletal muscle | 20.7 |
| 97497_Patient-11ut_uterus | 3.2 |
| 97498_Patient-11pl_placenta | 1.8 |
| 97500_Patient-12go_adipose | 8.5 |
| 97501_Patient-12sk_skeletal muscle | 100.0 |
| 97502_Patient-12ut_uterus | 2.2 |
| 97503_Patient-12pl_placenta | 0.0 |
| 94721_Donor 2 U - A_Mesenchymal | 0.0 |
| Stem Cells | |
| 94722_Donor 2 U - B_Mesenchymal Stem | 1.5 |
| Cells | |
| 94723_Donor 2 U - C_Mesenchymal Stem | 1.5 |
| Cells | |
| 94709_Donor 2 AM - A_adipose | 0.8 |
| 94710_Donor 2 AM - B_adipose | 0.0 |
| 94711_Donor 2 AM - C_adipose | 1.8 |
| 94712_Donor 2 AD - A_adipose | 5.3 |
| 94713_Donor 2 AD - B_adipose | 3.2 |
| 94714_Donor 2 AD - C_adipose | 0.0 |
| 94742_Donor 3 U - A_Mesenchymal Stem | 2.6 |
| Cells | |
| 94743_Donor 3 U - B_Mesenchymal Stem | 2.6 |
| Cells | |
| 94730_Donor 3 AM - A_adipose | 0.8 |
| 94731_Donor 3 AM - B_adipose | 1.7 |
| 94732_Donor 3 AM - C_adipose | 1.5 |
| 94733_Donor 3 AD - A_adipose | 4.8 |
| 94734_Donor 3 AD - B_adipose | 2.0 |
| 94735_Donor 3 AD - C_adipose | 2.5 |
| 77138_Liver_HepG2untreated | 0.0 |
| 73556_Heart_Cardiac stromal cells | 0.0 |
| (primary) | |
| 81735_Small Intestine | 15.6 |
| 72409_Kidney_Proximal Convoluted | 0.0 |
| Tubule | |
| 82685_Small intestine_Duodenum | 5.9 |
| 90650_Adrenal_Adrenocortical adenoma | 2.9 |
| 72410_Kidney_HRCE | 7.5 |
| 72411_Kidney_HRE | 3.3 |
| 73139_Uterus_Uterine smooth muscle cells | 0.0 |

[0594] TABLE FJ
general oncology screening panel v 2.4
Column A - Rel. Exp. (%) Ag3035 Run 259737910

| Tissue Name | A |
|---|---|
| Colon cancer 1 | 7.6 |
| Colon cancer NAT 1 | 14.7 |
| Colon cancer 2 | 3.7 |
| Colon cancer NAT 2 | 10.0 |
| Colon cancer 3 | 7.3 |
| Colon cancer NAT 3 | 25.9 |
| Colon malignant cancer 4 | 1.7 |
| Colon normal adjacent tissue 4 | 1.6 |
| Lung cancer 1 | 9.5 |
| Lung NAT 1 | 2.9 |
| Lung cancer 2 | 42.3 |
| Lung NAT 2 | 23.3 |
| Squamous cell carcinoma 3 | 73.7 |
| Lung NAT 3 | 1.3 |
| metastatic melanoma 1 | 37.1 |
| Melanoma 2 | 9.4 |
| Melanoma 3 | 1.4 |
| metastatic melanoma 4 | 100.0 |
| metastatic melanoma 5 | 39.8 |
| Bladder cancer 1 | 2.9 |
| Bladder cancer NAT 1 | 0.0 |
| Bladder cancer 2 | 3.2 |
| Bladder cancer NAT 2 | 0.0 |
| Bladder cancer NAT 3 | 0.0 |
| Bladder cancer NAT 4 | 25.7 |
| Prostate adenocarcinoma 1 | 8.3 |
| Prostate adenocarcinoma 2 | 1.6 |
| Prostate adenocarcinoma 3 | 3.4 |
| Prostate adenocarcinoma 4 | 9.5 |
| Prostate cancer NAT 5 | 2.4 |
| Prostate adenocarcinoma 6 | 0.0 |
| Prostate adenocarcinoma 7 | 4.9 |
| Prostate adenocarcinoma 8 | 0.0 |
| Prostate adenocarcinoma 9 | 20.6 |
| Prostate cancer NAT 10 | 0.4 |
| Kidney cancer 1 | 1.9 |
| KidneyNAT 1 | 8.1 |
| Kidney cancer 2 | 34.4 |
| Kidney NAT 2 | 7.6 |
| Kidney cancer 3 | 12.9 |
| Kidney NAT 3 | 4.5 |
| Kidney cancer 4 | 3.4 |
| Kidney NAT 4 | 5.9 |

AI_comprehensive panel_v1.0 Summary: Ag3035 Highest expression of the CG53054-02 gene was detected in a COPD sample (CT=30). This gene shows widespread expression in this panel. Moderate levels of expression of this gene were detected in samples derived from normal and orthoarthitis/rheumatoid arthritis bone, cartilage, synovium and synovial fluid samples, as well as from normal lung, COPD lung, emphysema, atopic asthma, asthma, allergy, Crohn's disease (normal matched control and diseased), ulcerative colitis (normal matched control and diseased), and psoriasis (normal matched control and diseased). Therapeutic modulation of the activity of this gene or its protein product will ameliorate symptoms/conditions associated with autoimmune and inflammatory disorders, including psoriasis, allergy, asthma, inflammatory bowel disease, rheumatoid arthritis and osteoarthritis.
Oncology_cell_line_screening_panel_v3.2 Summary: Ag3035 Highest expression of this gene was seen in lung cancer cell line DMS-79 (CT=28.6). Moderate to low expression of this gene was also seen in number of cancer cell lines derived from tongue, bone, bladder, pancreatic, cervical, uterine, gastric, colon and lung cancer. Gene or protein expression levels are useful as a marker to detect the presence of these cancers. Therapeutic modulation of the activity of this gene or its protein product is useful in the treatment of these cancers.
Panel 1.3D Summary: Ag2261 This gene was expressed at moderate levels in a number of metabolic tissues, with highest overall expression seen in fetal skeletal muscle (CTs=30.4-31.8). The higher levels of expression in fetal skeletal muscle when compared to adult skeletal muscle suggests that the protein product encoded by this gene may be useful in treating muscular dystrophy, Lesch-Nyhan syndrome, myasthenia gravis and other conditions that result in weak or dystrophic muscle. This gene was also expressed in adipose, thyroid and heart. Since biologic cross-talk between adipose and thyroid is a component of some forms of obesity, therapeutic modulation of the activity of this gene or its protein product is useful for the treatment of metabolic disease, including obesity and Type 2 diabetes.

[0598] Ag3035 This probe/primer set recognizes a distinct portion of this gene that shows a distinctive expression pattern when compared to Ag2261. This observation may indicate that the probe/primer sets can distinguish splice variants of this gene. In contrast to the results obtained with Ag2261, expression of this gene was highest in an ovarian cancer cell line (CT=30.6). As was the case for Ag2261, expression of this gene using Ag3035 was also relatively high in fetal skeletal muscle. However, Ag3035 showed higher levels of gene expression in adult skeletal muscle as well as in adult and fetal heart. Most other expression is similar using both probe/primer sets. Please see Ag2261 for additional information.

[0599] Panel 2D Summary: Ag2261 This gene was consistently expressed in samples of breast cancer, uterine cancer and lung cancer relative to their respective normal adjacent tissue controls. Gene or protein expression levels are useful as marker to detect breast, uterine and lung cancers. Therapeutic modulation of the activity of this gene or its protein product using nucleic acid, protein, antibody or small molecule drugs is useful in the treatment of breast, lung or uterine cancers.

[0600] Panel 4.1D Summary: Ag3035 This probe/primer set recognizes a distinct portion of this gene and shows a distinctive expression pattern relative to probe/primer set Ag2261 in this panel. This observation may indicate that the probe/primer sets can distinguish splice variants of this gene. In contrast to the results obtained with Ag2261 (see panel 4D summary), expression of this gene was highest in normal kidney (CT=30.6). The other expression results for this panel were similar using both probe/primer sets. This gene encodes a WNT-14 homolog and was expressed at moderate to low levels in unstimulated or cytokine-activated keratinocytes as well as in lung and dermal fibroblast preparations (CTs=29-34). Therapeutic modulation of the activity of this gene or its protein product will reduce or eliminate the symptoms of chronic obstructive pulmonary disease, asthma, emphysema, or psoriasis. In addition, due to its known effects on development of vertebrate joints, the protein encoded this gene will reduce or eliminate the symptoms of osetoarthritis (Christine Hartmann and Clifford J. Tabin, 2001, Wnt-14 Plays a Pivotal Role in Inducing Synovial Joint Formation in the Developing Appendicular Skeleton Cell, Vol 104, 341-35).

[0601] Panel 4D Summary: Ag2261 This gene was expressed at low levels in colon (CT=33.5). Low but significant levels of expression were also seen in normal lung, keratinocytes and dermal fibroblasts. This gene or the Wnt-14 protein encoded by it may play an important role in the normal homeostasis of these tissues. Therapeutic modulation of the activity of this gene or its protein product is useful to maintain or restore normal function to these organs during inflammation.

[0602] Panel 5 Islet Summary: Ag3035 Highest expression of this gene was seen in sample of skeletal muscle from a diabetic patient (CT=31.8). Significant expression of this gene was also seen in pancreatic islet cells. Therapeutic modulation of the activity of this gene or its protein product using nucleic acid, protein, antibody or small molecule drugs is useful in the treatment of metabolic related disease such as obesity and diabetes, especially type II diabetes.

[0603] General oncology screening panel_v_{—}2.4 Summary: Ag3035 Highest expression of this gene was detected in a metastatic melanoma sample (CT=31.3). Expression of this gene was also upregulated in prostate, lung and kidney cancers when compared to their appropriate normal adjacent tissue. Gene or protein expression levels are useful for the detection of prostate cancer, lung cancer, kidney cancer and metastatic melanoma. Therapeutic modulation of the activity of this gene or its protein product using nucleic acid, protein, antibody or small molecule drugs is useful for the treatment of these cancers.

[0604] G. CG53473-02: Neuromedin B-32 Precursor

[0605] Expression of gene CG53473-02 was assessed using the primer-probe set Ag235, described in Table GA. Results of the RTQ-PCR runs are shown in Tables GB and GC.

TABLE GA
Probe Name Ag235

| | | | Start | SEQ ID |
|---|---|---|---|---|
| Primers | Sequences | Length | Position | No |
| Forward | 5′-ttccagcccatcccc | 18 | 225 | 307 |
| | att-3′ | | | |
| Probe | TET-5′-ccccacacctccct | 22 | 253 | 308 |
| | gagggacc-3′-TAMRA | | | |
| Reverse | 5′-cagatcatgactcagctg | 23 | 278 | 309 |
| | cagtc-3′ | | | |

[0606] TABLE GB
Panel 1.2

| Tissue Name | A | B |
|---|---|---|
| Endothelial cells | 4.6 | 4.0 |
| Heart (Fetal) | 0.7 | 1.8 |
| Pancreas | 20.6 | 0.6 |
| Pancreatic ca. CAPAN 2 | 4.3 | 2.7 |
| Adrenal Gland | 100.0 | 100.0 |
| Thyroid | 72.2 | 6.2 |
| Salivary gland | 12.6 | 13.8 |
| Pituitary gland | 23.3 | 2.7 |
| Brain (fetal) | 13.7 | 7.7 |
| Brain (whole) | 11.7 | 12.3 |
| Brain (amygdala) | 5.7 | 8.2 |
| Brain (cerebellum) | 4.5 | 11.9 |
| Brain (hippocampus) | 11.3 | 26.2 |
| Brain (thalamus) | 4.2 | 11.9 |
| Cerebral Cortex | 3.9 | 19.5 |
| Spinal cord | 17.4 | 19.5 |
| glio/astro U87-MG | 43.2 | 16.3 |
| glio/astro U-118-MG | 1.0 | 0.3 |
| astrocytoma SW1783 | 1.9 | 0.6 |
| neuro*; met SK-N-AS | 29.3 | 10.7 |
| astrocytoma SF-539 | 1.2 | 0.3 |
| astrocytoma SNB-75 | 0.0 | 0.3 |
| glioma SNB-19 | 25.2 | 11.8 |
| glioma U251 | 5.3 | 2.8 |
| glioma SF-295 | 0.2 | 0.1 |
| Heart | 9.9 | 8.5 |
| Skeletal Muscle | 8.7 | 2.7 |
| Bone marrow | 1.3 | 0.7 |
| Thymus | 0.4 | 0.3 |
| Spleen | 1.8 | 1.1 |
| Lymph node | 1.1 | 3.0 |
| Colorectal Tissue | 0.0 | 0.3 |
| Stomach | 2.6 | 2.4 |
| Small intestine | 1.4 | 1.3 |
| Colon ca. SW480 | 1.0 | 0.1 |
| Colon ca.* SW620 (SW480 met) | 9.2 | 0.8 |
| Colon ca. HT29 | 25.3 | 4.7 |
| Colon ca. HCT-116 | 4.8 | 2.0 |
| Colon ca. CaCo-2 | 8.0 | 3.7 |
| Colon ca. Tissue (ODO3866) | 0.8 | 1.1 |
| Colon ca. HCC-2998 | 42.3 | 14.3 |
| Gastric ca.* (liver met) NCI-N87 | 54.7 | 18.3 |
| Bladder | 11.7 | 3.5 |
| Trachea | 5.6 | 4.0 |
| Kidney | 6.7 | 9.1 |
| Kidney (fetal) | 6.8 | 6.4 |
| Renal ca. 786-0 | 0.3 | 0.2 |
| Renal ca. A498 | 4.3 | 1.5 |
| Renal ca. RXF 393 | 8.7 | 5.3 |
| Renal ca. ACHN | 2.2 | 1.0 |
| Renal ca. UO-31 | 0.6 | 0.3 |
| Renal ca. TK-10 | 1.4 | 0.8 |
| Liver | 0.4 | 1.5 |
| Liver (fetal) | 1.1 | 1.7 |
| Liver ca. (hepatoblast) HepG2 | 1.7 | 1.4 |
| Lung | 3.4 | 3.3 |
| Lung (fetal) | 2.9 | 2.0 |
| Lung ca. (small cell) LX-1 | 7.8 | 1.5 |
| Lung ca. (small cell) NCI-H69 | 0.3 | 0.2 |
| Lung ca. (s. cell var.) SHP-77 | 3.8 | 1.4 |
| Lung ca. (large cell) NCI-H460 | 6.0 | 11.8 |
| Lung ca. (non-sm. cell) A549 | 6.9 | 1.7 |
| Lung ca. (non-s. cell) NCI-H23 | 12.9 | 24.1 |
| Lung ca. (non-s. cell) HOP-62 | 2.4 | 0.5 |
| Lung ca. (non-s. cl) NCI-H522 | 27.0 | 4.0 |
| Lung ca. (squam.) SW 900 | 6.0 | 2.4 |
| Lung ca. (squam.) NCI-H596 | 1.0 | 0.3 |
| Mammary gland | 39.5 | 20.3 |
| Breast ca.* (pl. ef) MCF-7 | 24.0 | 13.0 |
| Breast ca.* (pl. ef) MDA-MB-231 | 0.9 | 0.5 |
| Breast ca.* (pl. ef) T47D | 0.9 | 4.3 |
| Breast ca. BT-549 | 11.5 | 8.5 |
| Breast ca. MDA-N | 13.7 | 8.9 |
| Ovary | 5.8 | 1.8 |
| Ovarian ca. OVCAR-3 | 2.0 | 0.8 |
| Ovarian ca. OVCAR-4 | 1.1 | 0.3 |
| Ovarian ca. OVCAR-5 | 49.0 | 6.5 |
| Ovarian ca. OVCAR-8 | 1.0 | 1.3 |
| Ovarian ca. IGROV-1 | 10.7 | 3.7 |
| Ovarian ca. (ascites) SK-OV-3 | 2.0 | 1.7 |
| Uterus | 2.9 | 2.1 |
| Placenta | 1.8 | 1.1 |
| Prostate | 4.7 | 4.9 |
| Prostate ca.* (bone met) PC-3 | 2.8 | 1.7 |
| Testis | 33.2 | 5.0 |
| Melanoma Hs688(A).T | 1.5 | 0.2 |
| Melanoma* (met) Hs688(B).T | 1.7 | 0.2 |
| Melanoma UACC-62 | 1.5 | 0.4 |
| Melanoma M14 | 5.5 | 2.5 |
| Melanoma LOX IMVI | 6.4 | 1.3 |
| Melanoma* (met) SK-MEL-5 | 6.9 | 2.0 |

Column A - Rel. Exp. (%) Ag235, Run 119215838
Column B - Rel. Exp. (%) Ag235, Run 122741595

[0607] TABLE GC
Panel 2D

| Tissue Name | A |
|---|---|
| Normal Colon | 3.3 |
| CC Well to Mod Diff (ODO3866) | 3.1 |
| CC Margin (ODO3866) | 0.8 |
| CC Gr.2 rectosigmoid (ODO3868) | 1.2 |
| CC Margin (ODO3868) | 0.4 |
| CC Mod Diff (ODO3920) | 3.0 |
| CC Margin (ODO3920) | 0.7 |
| CC Gr.2 ascend colon (ODO3921) | 1.4 |
| CC Margin (ODO3921) | 1.1 |
| CC from Partial Hepatectomy (ODO4309) Mets | 5.5 |
| Liver Margin (ODO4309) | 0.7 |
| Colon mets to lung (OD04451-01) | 3.0 |
| Lung Margin (OD04451-02) | 3.0 |
| Normal Prostate 6546-1 | 9.1 |
| Prostate Cancer (OD04410) | 2.7 |
| Prostate Margin (OD04410) | 0.8 |
| Prostate Cancer (OD04720-01) | 1.1 |
| Prostate Margin (OD04720-02) | 2.0 |
| Normal Lung 061010 | 5.1 |
| Lung Met to Muscle (ODO4286) | 7.8 |
| Muscle Margin (ODO4286) | 2.0 |
| Lung Malignant Cancer (OD03126) | 6.3 |
| Lung Margin (OD03126) | 6.7 |
| Lung Cancer (OD04404) | 37.1 |
| Lung Margin (OD04404) | 4.5 |
| Lung Cancer (OD04565) | 19.6 |
| Lung Margin (OD04565) | 2.0 |
| Lung Cancer (OD04237-01) | 8.4 |
| Lung Margin (OD04237-02) | 2.8 |
| Ocular Mel Met to Liver (ODO4310) | 1.6 |
| Liver Margin (ODO4310) | 0.6 |
| Melanoma Mets to Lung (OD04321) | 0.4 |
| Lung Margin (OD04321) | 2.5 |
| Normal Kidney | 1.3 |
| Kidney Ca, Nuclear grade 2 (OD04338) | 5.9 |
| Kidney Margin (OD04338) | 2.7 |
| Kidney Ca Nuclear grade 1/2 (OD04339) | 14.0 |
| Kidney Margin (OD04339) | 5.0 |
| Kidney Ca, Clear cell type (OD04340) | 15.9 |
| Kidney Margin (OD04340) | 3.8 |
| Kidney Ca, Nuclear grade 3 (OD04348) | 4.6 |
| Kidney Margin (OD04348) | 0.9 |
| Kidney Cancer (OD04622-01) | 86.5 |
| Kidney Margin (OD04622-03) | 1.6 |
| Kidney Cancer (OD04450-01) | 4.5 |
| Kidney Margin (OD04450-03) | 1.3 |
| Kidney Cancer 8120607 | 1.5 |
| Kidney Margin 8120608 | 1.7 |
| Kidney Cancer 8120613 | 10.1 |
| Kidney Margin 8120614 | 4.0 |
| Kidney Cancer 9010320 | 100.0 |
| Kidney Margin 9010321 | 7.2 |
| Normal Uterus | 1.3 |
| Uterus Cancer 064011 | 3.1 |
| Normal Thyroid | 66.4 |
| Thyroid Cancer 064010 | 4.5 |
| Thyroid Cancer A302152 | 6.9 |
| Thyroid Margin A302153 | 9.9 |
| Normal Breast | 7.4 |
| Breast Cancer (OD04566) | 0.7 |
| Breast Cancer (OD04590-01) | 5.4 |
| Breast Cancer Mets (OD04590-03) | 11.8 |
| Breast Cancer Metastasis (OD04655-05) | 1.4 |
| Breast Cancer 064006 | 1.5 |
| Breast Cancer 1024 | 8.8 |
| Breast Cancer 9100266 | 1.7 |
| Breast Margin 9100265 | 0.9 |
| Breast Cancer A209073 | 1.1 |
| Breast Margin A209073 | 2.4 |
| Normal Liver | 0.7 |
| Liver Cancer 064003 | 0.7 |
| Liver Cancer 1025 | 0.8 |
| Liver Cancer 1026 | 1.9 |
| Liver Cancer 6004-T | 0.8 |
| Liver Tissue 6004-N | 7.8 |
| Liver Cancer 6005-T | 2.6 |
| Liver Tissue 6005-N | 0.7 |
| Normal Bladder | 4.5 |
| Bladder Cancer 1023 | 2.2 |
| Bladder Cancer A302173 | 4.2 |
| Bladder Cancer (OD04718-01) | 16.5 |
| Bladder Normal Adjacent (OD04718-03) | 2.6 |
| Normal Ovary | 5.0 |
| Ovarian Cancer 064008 | 6.7 |
| Ovarian Cancer (OD04768-07) | 10.2 |
| Ovary Margin (OD04768-08) | 0.1 |
| Normal Stomach | 2.6 |
| Gastric Cancer 9060358 | 0.0 |
| Stomach Margin 9060359 | 0.4 |
| Gastric Cancer 9060395 | 3.2 |
| Stomach Margin 9060394 | 2.2 |
| Gastric Cancer 9060397 | 9.2 |
| Stomach Margin 9060396 | 2.7 |
| Gastric Cancer 064005 | 2.8 |

Column A - Rel. Exp. (%) AG235, Run 145728457

Panel 1.2 Summary: Ag235 Highest expression of the CG53473-02 gene was seen in adrenal gland (CTs=23-26). Significant expression of this gene was also detected in pancreas, adrenal gland, thyroid, pituitary gland, skeletal muscle, heart, liver and the gastrointestinal tract. Therapeutic modulation of the activity of this gene or its protein product is useful in the treatment of endocrine/metabolically related diseases, such as obesity and diabetes.

[0609] In addition, this gene was expressed at high to moderate levels in all regions of the central nervous system examined, including amygdala, hippocampus, substantia nigra, thalamus, cerebellum, cerebral cortex, and spinal cord. Therapeutic modulation of the activity of this gene or its protein product is useful in the treatment of central nervous system disorders such as Alzheimer's disease, Parkinson's disease, epilepsy, multiple sclerosis, schizophrenia and depression.

[0610] High expression of this gene was also seen in a number of cancer cell lines derived from pancreatic, gastric, colon, lung, liver, renal, breast, ovarian, prostate, squamous cell carcinoma, melanoma and brain cancers. Gene or protein expression levels are useful as a marker for these cancers. Therapeutic modulation of the activity of this gene or its protein product is useful in the treatment of pancreatic, gastric, colon, lung, liver, renal, breast, ovarian, prostate, melanoma and brain cancers.

[0611] Panel 2D Summary: Ag235 Highest expression of this gene was detected in a kidney cancer sample (CT=27.9). This gene was overexpressed in a number of kidney, gastric, ovarian, bladder, breast and lung cancers relative to the appropriate normal tissues. Gene or protein expression levels are useful for the detection of these cancers. Therapeutic modulation of the activity of this gene or its protein product using nucleic acid, protein, antibody or small molecule drugs is useful in the treatment of kidney, gastric, ovarian, bladder, breast and lung cancer.

[0612] H. CG55184-03: Cerebellin

[0613] Expression of gene CG55184-03 was assessed using the primer-probe set Ag1161, described in Table HA. Results of the RTQ-PCR runs are shown in Tables HB, HC, HD and HE.

TABLE HA
Probe Name Ag1161

| | | | Start | SEQ ID |
|---|---|---|---|---|
| Primers | Sequences | Length | Position | No |
| Forward | 5′-aactccaaggtcgcct | 19 | 205 | 310 |
| | tct-3′ | | | |
| Probe | TET-5′-aaccacgagccatc | 23 | 241 | 311 |
| | cgagatgag-3′-TAMRA | | | |
| Reverse | 5′-agtaaatgatgcgcgtct | 21 | 266 | 312 |
| | tgt-3′ | | | |

[0614] TABLE HB
CNS neurodegeneration v1.0

| Tissue Name | A | B |
|---|---|---|
| AD 1 Hippo | 5.6 | 5.6 |
| AD 2 Hippo | 55.9 | 49.7 |
| AD 3 Hippo | 20.6 | 15.1 |
| AD 4 Hippo | 100.0 | 100.0 |
| AD 5 Hippo | 31.0 | 40.9 |
| AD 6 Hippo | 8.2 | 8.2 |
| Control 2 Hippo | 29.3 | 30.4 |
| Control 4 Hippo | 10.7 | 10.0 |
| Control (Path) 3 Hippo | 19.8 | 16.0 |
| AD 1 Temporal Ctx | 10.3 | 8.7 |
| AD 2 Temporal Ctx | 25.0 | 25.9 |
| AD 3 Temporal Ctx | 31.2 | 36.3 |
| AD 4 Temporal Ctx | 44.8 | 38.4 |
| AD 5 Inf Temporal Ctx | 25.2 | 25.0 |
| AD 5 Sup Temporal Ctx | 17.8 | 19.5 |
| AD 6 Inf Temporal Ctx | 16.4 | 16.4 |
| AD 6 Sup Temporal Ctx | 25.2 | 26.6 |
| Control 1 Temporal Ctx | 30.6 | 42.6 |
| Control 2 Temporal Ctx | 29.3 | 31.6 |
| Control 3 Temporal Ctx | 69.7 | 58.6 |
| Control 3 Temporal Ctx | 29.1 | 29.1 |
| Control (Path) 1 Temporal Ctx | 41.8 | 40.3 |
| Control (Path) 2 Temporal Ctx | 50.0 | 44.8 |
| Control (Path) 3 Temporal Ctx | 22.5 | 33.2 |
| Control (Path) 4 Temporal Ctx | 43.2 | 44.8 |
| AD 1 Occipital Ctx | 20.7 | 22.2 |
| AD 2 Occipital Ctx (Missing) | 0.9 | 0.8 |
| AD 3 Occipital Ctx | 27.2 | 26.2 |
| AD 4 Occipital Ctx | 59.5 | 70.2 |
| AD 5 Occipital Ctx | 34.4 | 37.9 |
| AD 6 Occipital Ctx | 12.8 | 10.7 |
| Control 1 Occipital Ctx | 19.9 | 15.8 |
| Control 2 Occipital Ctx | 22.5 | 18.9 |
| Control 3 Occipital Ctx | 45.4 | 19.2 |
| Control 4 Occipital Ctx | 20.0 | 24.7 |
| Control (Path) 1 Occipital Ctx | 30.6 | 35.4 |
| Control (Path) 2 Occipital Ctx | 49.3 | 48.6 |
| Control (Path) 3 Occipital Ctx | 6.6 | 8.9 |
| Control (Path) 4 Occipital Ctx | 41.8 | 49.0 |
| Control 1 Parietal Ctx | 29.1 | 0.1 |
| Control 2 Parietal Ctx | 21.9 | 19.5 |
| Control 3 Parietal Ctx | 40.1 | 46.7 |
| Control (Path) 1 Parietal Ctx | 54.7 | 49.7 |
| Control (Path) 2 Parietal Ctx | 46.0 | 47.6 |
| Control (Path) 3 Parietal Ctx | 23.2 | 18.6 |
| Control (Path) 4 Parietal Ctx | 43.2 | 45.7 |

Column A - Rel. Exp. (%) Ag1161, Run 206992277
Column B - Rel. Exp. (%) Ag1161, Run 230512498

[0615] TABLE HC
General screening panel v1.7

| Tissue Name | A |
|---|---|
| Adipose | 0.4 |
| HUVEC | 0.0 |
| Melanoma* Hs688(A).T | 0.0 |
| Melanoma* Hs688(B).T | 0.0 |
| Melanoma (met) SK-MEL-5 | 0.0 |
| Testis | 5.6 |
| Prostate ca. (bone met) PC-3 | 0.0 |
| Prostate ca. DU145 | 0.0 |
| Prostate pool | 0.1 |
| Uterus pool | 0.1 |
| Ovarian ca. OVCAR-3 | 0.0 |
| Ovarian ca. (ascites) SK-OV-3 | 0.0 |
| Ovarian ca. OVCAR-4 | 0.0 |
| Ovarian ca. OVCAR-5 | 0.0 |
| Ovarian ca. IGROV-1 | 0.0 |
| Ovarian ca. OVCAR-8 | 0.0 |
| Ovary | 12.6 |
| Breast ca. MCF-7 | 0.1 |
| Breast ca. MDA-MB-231 | 0.0 |
| Breast ca. BT-549 | 0.0 |
| Breast ca. T47D | 0.0 |
| Breast pool | 0.8 |
| Trachea | 0.6 |
| Lung | 0.2 |
| Fetal Lung | 0.7 |
| Lung ca. NCI-N417 | 0.0 |
| Lung ca. LX-1 | 0.0 |
| Lung ca. NCI-H146 | 0.3 |
| Lung ca. SHP-77 | 0.0 |
| Lung ca. NCI-H23 | 0.0 |
| Lung ca. NCI-H460 | 0.0 |
| Lung ca. HOP-62 | 0.0 |
| Lung ca. NCI-H522 | 0.0 |
| Lung ca. DMS-114 | 0.0 |
| Liver | 0.8 |
| Fetal Liver | 0.4 |
| Kidney pool | 2.7 |
| Fetal Kidney | 3.4 |
| Renal ca. 786-0 | 0.0 |
| Renal ca. A498 | 0.0 |
| Renal ca. ACHN | 0.0 |
| Renal ca. UO-31 | 0.0 |
| Renal ca. TK-10 | 0.0 |
| Bladder | 0.4 |
| Gastric ca. (liver met.) NCI-N87 | 0.0 |
| Stomach | 0.0 |
| Colon ca. SW-948 | 0.1 |
| Colon ca. SW480 | 0.0 |
| Colon ca. (SW480 met) SW620 | 0.0 |
| Colon ca. HT29 | 0.0 |
| Colon ca. HCT-116 | 0.0 |
| Colon cancer tissue | 0.1 |
| Colon ca. SW1116 | 0.0 |
| Colon ca. Colo-205 | 0.0 |
| Colon ca. SW-48 | 0.0 |
| Colon | 0.0 |
| Small Intestine | 0.3 |
| Fetal Heart | 0.0 |
| Heart | 0.2 |
| Lymph Node pool 1 | 0.8 |
| Lymph Node pool 2 | 0.1 |
| Fetal Skeletal Muscle | 0.2 |
| Skeletal Muscle pool | 0.6 |
| Skeletal Muscle | 1.8 |
| Spleen | 3.2 |
| Thymus | 1.1 |
| CNS cancer (glio/astro) SF-268 | 0.0 |
| CNS cancer (glio/astro) T98G | 0.0 |
| CNS cancer (neuro; met) SK-N-AS | 0.1 |
| CNS cancer (astro) SF-539 | 0.0 |
| CNS cancer (astro) SNB-75 | 0.0 |
| CNS cancer (glio) SNB-19 | 0.0 |
| CNS cancer (glio) SF-295 | 0.0 |
| Brain (Amygdala) | 60.3 |
| Brain (Cerebellum) | 0.8 |
| Brain (Fetal) | 20.6 |
| Brain (Hippocampus) | 21.3 |
| Cerebral Cortex pool | 36.9 |
| Brain (Substantia nigra) | 26.6 |
| Brain (Thalamus) | 42.6 |
| Brain (Whole) | 100.0 |
| Spinal Cord | 1.9 |
| Adrenal Gland | 36.6 |
| Pituitary Gland | 0.0 |
| Salivary Gland | 0.0 |
| Thyroid | 1.0 |
| Pancreatic ca. PANC-1 | 0.0 |
| Pancreas pool | 0.8 |

Column A - Rel. Exp. (%) Ag1161, Run 317667428

[0616] TABLE HD
Panel 2.2

| Tissue Name | A |
|---|---|
| Normal Colon | 4.8 |
| Colon cancer (OD06064) | 0.0 |
| Colon Margin (OD06064) | 0.0 |
| Colon cancer (OD06159) | 0.0 |
| Colon Margin (OD06159) | 0.0 |
| Colon cancer (OD06297-04) | 0.0 |
| Colon Margin (OD06297-05) | 0.0 |
| CC Gr.2 ascend colon (ODO3921) | 0.0 |
| CC Margin (ODO3921) | 4.7 |
| Colon cancer metastasis (OD06104) | 0.0 |
| Lung Margin (OD06104) | 3.6 |
| Colon mets to lung (OD04451-01) | 0.0 |
| Lung Margin (OD04451-02) | 4.0 |
| Normal Prostate | 4.5 |
| Prostate Cancer (OD04410) | 0.0 |
| Prostate Margin (OD04410) | 0.0 |
| Normal Ovary | 26.4 |
| Ovarian cancer (OD06283-03) | 0.0 |
| Ovarian Margin (OD06283-07) | 100.0 |
| Ovarian Cancer 064008 | 47.6 |
| Ovarian cancer (OD06145) | 35.4 |
| Ovarian Margin (OD06145) | 33.2 |
| Ovarian cancer (OD06455-03) | 0.0 |
| Ovarian Margin (OD06455-07) | 22.2 |
| Normal Lung | 5.3 |
| Invasive poor diff. lung adeno (ODO4945-01 | 0.0 |
| Lung Margin (ODO4945-03) | 0.0 |
| Lung Malignant Cancer (OD03126) | 0.0 |
| Lung Margin (OD03126) | 4.4 |
| Lung Cancer (OD05014A) | 0.0 |
| Lung Margin (OD05014B) | 10.2 |
| Lung cancer (OD06081) | 0.0 |
| Lung Margin (OD06081) | 0.0 |
| Lung Cancer (OD04237-01) | 0.0 |
| Lung Margin (OD04237-02) | 45.4 |
| Ocular Melanoma Metastasis | 0.0 |
| Ocular Melanoma Margin (Liver) | 6.1 |
| Melanoma Metastasis | 0.0 |
| Melanoma Margin (Lung) | 4.7 |
| Normal Kidney | 0.0 |
| Kidney Ca, Nuclear grade 2 (OD04338) | 8.4 |
| Kidney Margin (OD04338) | 0.0 |
| Kidney Ca Nuclear grade 1/2 (OD04339) | 2.2 |
| Kidney Margin (OD04339) | 27.7 |
| Kidney Ca, Clear cell type (OD04340) | 33.9 |
| Kidney Margin (OD04340) | 8.8 |
| Kidney Ca, Nuclear grade 3 (OD04348) | 9.7 |
| Kidney Margin (OD04348) | 14.0 |
| Kidney malignant cancer (OD06204B) | 5.2 |
| Kidney normal adjacent tissue (OD06204E) | 8.8 |
| Kidney Cancer (OD04450-01) | 0.0 |
| Kidney Margin (OD04450-03) | 4.9 |
| Kidney Cancer 8120613 | 0.0 |
| Kidney Margin 8120614 | 5.2 |
| Kidney Cancer 9010320 | 21.5 |
| Kidney Margin 9010321 | 0.0 |
| Kidney Cancer 8120607 | 5.2 |
| Kidney Margin 8120608 | 0.0 |
| Normal Uterus | 3.6 |
| Uterine Cancer 064011 | 0.0 |
| Normal Thyroid | 0.0 |
| Thyroid Cancer 064010 | 40.9 |
| Thyroid Cancer A302152 | 9.0 |
| Thyroid Margin A302153 | 3.7 |
| Normal Breast | 0.0 |
| Breast Cancer (OD04566) | 5.2 |
| Breast Cancer 1024 | 0.0 |
| Breast Cancer (OD04590-01) | 8.6 |
| Breast Cancer Mets (OD04590-03) | 10.5 |
| Breast Cancer Metastasis (OD04655-05) | 0.0 |
| Breast Cancer 064006 | 5.3 |
| Breast Cancer 9100266 | 0.0 |
| Breast Margin 9100265 | 8.1 |
| Breast Cancer A209073 | 9.7 |
| Breast Margin A2090734 | 10.4 |
| Breast cancer (OD06083) | 4.7 |
| Breast cancer node metastasis (OD06083) | 7.7 |
| Normal Liver | 17.6 |
| Liver Cancer 1026 | 0.0 |
| Liver Cancer 1025 | 17.9 |
| Liver Cancer 6004-T | 0.0 |
| Liver Tissue 6004-N | 15.7 |
| Liver Cancer 6005-T | 0.0 |
| Liver Tissue 6005-N | 0.0 |
| Liver Cancer 064003 | 0.0 |
| Normal Bladder | 0.0 |
| Bladder Cancer 1023 | 0.0 |
| Bladder Cancer A302173 | 0.0 |
| Normal Stomach | 0.0 |
| Gastric Cancer 9060397 | 0.0 |
| Stomach Margin 9060396 | 8.7 |
| Gastric Cancer 9060395 | 16.7 |
| Stomach Margin 9060394 | 0.0 |
| Gastric Cancer 064005 | 0.0 |

Column A - Rel. Exp. (%) Ag1161, Run 173769890

[0617] TABLE HE
Panel 4D

| Tissue Name | A |
|---|---|
| Secondary Th1 act | 0.0 |
| Secondary Th2 act | 0.0 |
| Secondary Tr1 act | 0.0 |
| Secondary Th1 rest | 0.0 |
| Secondary Th2 rest | 0.0 |
| Secondary Tr1 rest | 0.0 |
| Primary Th1 act | 0.0 |
| Primary Th2 act | 0.0 |
| Primary Tr1 act | 0.0 |
| Primary Th1 rest | 0.0 |
| Primary Th2 rest | 0.0 |
| Primary Tr1 rest | 0.0 |
| CD45RA CD4 lymphocyte act | 0.0 |
| CD45RO CD4 lymphocyte act | 0.0 |
| CD8 lymphocyte act | 0.0 |
| Secondary CD8 lymphocyte rest | 0.0 |
| Secondary CD8 lymphocyte act | 0.0 |
| CD4 lymphocyte none | 0.0 |
| 2ry Th1/Th2/Tr1_anti-CD95 CH11 | 0.0 |
| LAK cells rest | 0.0 |
| LAK cells IL-2 | 0.0 |
| LAK cells IL-2 + IL-12 | 0.0 |
| LAK cells IL-2 + IFN gamma | 0.0 |
| LAK cells IL-2 + IL-18 | 0.0 |
| LAK cells PMA/ionomycin | 0.0 |
| NK Cells IL-2 rest | 0.0 |
| Two Way MLR 3 day | 0.0 |
| Two Way MLR 5 day | 0.0 |
| Two Way MLR 7 day | 0.0 |
| PBMC rest | 0.0 |
| PBMC PWM | 0.0 |
| PBMC PHA-L | 0.0 |
| Ramos (B cell) none | 0.0 |
| Ramos (B cell) ionomycin | 0.0 |
| B lymphocytes PWM | 0.0 |
| B lymphocytes CD40L and IL-4 | 0.0 |
| EOL-1 dbcAMP | 0.0 |
| EOL-1 dbcAMP PMA/ionomycin | 0.0 |
| Dendritic cells none | 0.0 |
| Dendritic cells LPS | 0.0 |
| Dendritic cells anti-CD40 | 0.0 |
| Monocytes rest | 0.0 |
| Monocytes LPS | 0.0 |
| Macrophages rest | 0.0 |
| Macrophages LPS | 18.2 |
| HUVEC none | 0.0 |
| HUVEC starved | 0.0 |
| HUVEC IL-1beta | 0.0 |
| HUVEC IFN gamma | 0.0 |
| HUVEC TNF alpha + IFN gamma | 0.0 |
| HUVEC TNF alpha + IL4 | 0.0 |
| HUVEC IL-11 | 0.0 |
| Lung Microvascular EC none | 0.0 |
| Lung Microvascular EC TNFalpha + IL-1beta | 0.0 |
| Microvascular Dermal EC none | 0.0 |
| Microsvasular Dermal EC TNFalpha + IL-1beta | 0.0 |
| Bronchial epithelium TNFalpha + IL1beta | 0.0 |
| Small airway epithelium none | 0.0 |
| Small airway epithelium TNFalpha + IL-1beta | 0.0 |
| Coronery artery SMC rest | 0.0 |
| Coronery artery SMC TNFalpha + IL-1beta | 0.0 |
| Astrocytes rest | 0.0 |
| Astrocytes TNFalpha + IL-1beta | 0.0 |
| KU-812 (Basophil) rest | 0.0 |
| KU-812 (Basophil) PMA/ionomycin | 0.0 |
| CCD1106 (Keratinocytes) none | 0.0 |
| CCD1106 (Keratinocytes) TNFalpha + IL-1beta | 0.0 |
| Liver cirrhosis | 68.3 |
| Lupus kidney | 26.6 |
| NCI-H292 none | 0.0 |
| NCI-H292 IL-4 | 0.0 |
| NCI-H292 IL-9 | 0.0 |
| NCI-H292 IL-13 | 0.0 |
| NCI-H292 IFN gamma | 0.0 |
| HPAEC none | 0.0 |
| HPAEC TNF alpha + IL-1 beta | 0.0 |
| Lung fibroblast none | 0.0 |
| Lung fibroblast TNF alpha + IL-1 beta | 0.0 |
| Lung fibroblast IL-4 | 0.0 |
| Lung fibroblast IL-9 | 0.0 |
| Lung fibroblast IL-13 | 0.0 |
| Lung fibroblast IFN gamma | 0.0 |
| Dermal fibroblast CCD1070 rest | 0.0 |
| Dermal fibroblast CCD1070 TNF alpha | 0.0 |
| Dermal fibroblast CCD1070 IL-1 beta | 0.0 |
| Dermal fibroblast IFN gamma | 0.0 |
| Dermal fibroblast IL-4 | 0.0 |
| IBD Colitis 2 | 0.0 |
| IBD Crohn's | 8.8 |
| Colon | 81.8 |
| Lung | 100.0 |
| Thymus | 26.2 |
| Kidney | 25.9 |

Column A - Rel. Exp. (%) Ag1161, Run 139841942

CNS_neurodegeneration_v1.0 Summary: Ag1161 Expression of the CG55184-03 gene was down-regulated in the temporal cortex of Alzheimer's disease patients when compared with normal patients. Therefore, up-regulation of this gene or its protein product or treatment with specific agonists for this receptor is useful in reversing the dementia/memory loss and neuronal death associated with this disease.
General_screening_panel_v1.7 Summary: Ag1161 Highest expression of this gene was detected in whole brain (CT=26). This gene showed brain preferential expression with high expression seen in all the regions of the central nervous system examined, including amygdala, hippocampus, substantia nigra, thalamus, cerebellum, cerebral cortex, and spinal cord. Gene or protein expression levels are useful as a marker for brain. Therapeutic modulation of the activity of this gene or its protein product is useful in the treatment of central nervous system disorders such as Alzheimer's disease, Parkinson's disease, epilepsy, multiple sclerosis, schizophrenia and depression.

[0620] Moderate to low expression of this gene was also seen in tissues with metabolic/endocrine function including pancreas, adipose, adrenal gland, thyroid, skeletal muscle, liver and small intestine. Therapeutic modulation of the activity of this gene or its protein product is useful in the treatment of endocrine/metabolically related diseases, such as obesity and diabetes.

[0621] Panel 2.2 Summary: Ag1161 Highest expression of this gene was detected in normal ovarian tissue (CT=32). Expression of this gene was upregulated in normal ovarian and lung samples relative to corresponding cancer samples. Therapeutic modulation of the activity of this gene or its protein product using nucleic acid, protein, antibody or small molecule drugs is useful in the treatment of ovarian and lung cancers.

[0622] Low expression of this gene was also detected in a thyroid cancer sample. Therapeutic modulation of the activity of this gene or its protein product using nucleic acid, protein, antibody or small molecule drugs is useful in the treatment of thyroid cancer.

[0623] Panel 4D Summary: Ag1161 This gene was expressed at low levels in normal lung and colon (CTs=34). Expression of this gene was downregulated in the colon from a Crohn's disease patient was reduced. Therapeutic modulation of the activity of this gene or its protein product is useful in the treatment of inflammatory bowel diseases, such as Crohn's. Low expression of this gene was also seen in liver cirrhosis sample. Therapeutic modulation of the activity of this gene or its protein product is useful in the treatment of liver cirrhosis.

[0624] I. CG55274-05: Diazepam-binding Inhibitor

[0625] Expression of gene CG55274-05 was assessed using the primer-probe set Ag497, described in Table IA. Results of the RTQ-PCR runs are shown in Tables IB and IC.

TABLE IA
Probe Name Ag497

| | | | Start | SEQ ID |
|---|---|---|---|---|
| Primers | Sequences | Length | Position | No |
| Forward | 5′-gcagcatggaccctc | 18 | 181 | 313 |
| | caa-3′ | | | |
| Probe | TET-5′-acactcgttgcatc | 30 | 201 | 314 |
| | ttcctttgacaacc | | | |
| | tt-3′-TAMRA | | | |
| Reverse | 5′-tcggctcttttgccttag | 23 | 234 | 315 |
| | aaata-3′ | | | |

[0626] TABLE IB
Panel 1.1

| Tissue Name | A |
|---|---|
| Adrenal gland | 0.0 |
| Bladder | 0.0 |
| Brain (amygdala) | 0.0 |
| Brain (cerebellum) | 0.0 |
| Brain (hippocampus) | 0.0 |
| Brain (substantia nigra) | 0.0 |
| Brain (thalamus) | 0.0 |
| Cerebral Cortex | 0.0 |
| Brain (fetal) | 0.0 |
| Brain (whole) | 0.0 |
| glio/astro U-118-MG | 0.0 |
| astrocytoma SF-539 | 0.0 |
| astrocytoma SNB-75 | 0.0 |
| astrocytoma SW1783 | 0.0 |
| glioma U251 | 0.0 |
| glioma SF-295 | 0.0 |
| glioma SNB-19 | 0.0 |
| glio/astro U87-MG | 0.0 |
| neuro*; met SK-N-AS | 0.0 |
| Mammary gland | 0.0 |
| Breast ca. BT-549 | 0.0 |
| Breast ca. MDA-N | 0.0 |
| Breast ca.* (pl. ef) T47D | 0.0 |
| Breast ca.* (pl. ef) MCF-7 | 0.0 |
| Breast ca.* (pl. ef) MDA-MB-231 | 0.0 |
| Small intestine | 0.0 |
| Colorectal | 0.0 |
| Colon ca. HT29 | 0.0 |
| Colon ca. CaCo-2 | 0.0 |
| Colon ca. HCT-15 | 0.0 |
| Colon ca. HCT-116 | 0.0 |
| Colon ca. HCC-2998 | 0.0 |
| Colon ca. SW480 | 0.0 |
| Colon ca.* SW620 (SW480 met) | 0.0 |
| Stomach | 0.0 |
| Gastric ca. (liver met) NCI-N87 | 0.0 |
| Heart | 0.0 |
| Skeletal muscle (Fetal) | 0.0 |
| Skeletal muscle | 0.0 |
| Endothelial cells | 0.0 |
| Heart (Fetal) | 0.0 |
| Kidney | 0.0 |
| Kidney (fetal) | 0.0 |
| Renal ca. 786-0 | 0.0 |
| Renal ca. A498 | 0.0 |
| Renal ca. ACHN | 0.0 |
| Renal ca. TK-10 | 0.0 |
| Renal ca. UO-31 | 0.0 |
| Renal ca. RXF 393 | 0.0 |
| Liver | 0.0 |
| Liver (fetal) | 0.0 |
| Liver ca. (hepatoblast) HepG2 | 0.0 |
| Lung | 0.0 |
| Lung (fetal) | 0.0 |
| Lung ca. (non-s. cell) HOP-62 | 0.0 |
| Lung ca. (large cell)NCI-H460 | 0.0 |
| Lung ca. (non-s. cell) NCI-H23 | 0.0 |
| Lung ca. (non-s. cl) NCI-H522 | 0.0 |
| Lung ca. (non-sm. cell) A549 | 0.0 |
| Lung ca. (s. cell var.) SHP-77 | 0.0 |
| Lung ca. (small cell) LX-1 | 0.0 |
| Lung ca. (small cell) NCI-H69 | 12.0 |
| Lung ca. (squam.) SW 900 | 0.0 |
| Lung ca. (squam.) NCI-H596 | 0.0 |
| Lymph node | 0.0 |
| Spleen | 0.0 |
| Thymus | 0.0 |
| Ovary | 0.0 |
| Ovarian ca. IGROV-1 | 0.0 |
| Ovarian ca. OVCAR-3 | 0.0 |
| Ovarian ca. OVCAR-4 | 0.0 |
| Ovarian ca. OVCAR-5 | 100.0 |
| Ovarian ca. OVCAR-8 | 0.0 |
| Ovarian ca.* (ascites) SK-OV-3 | 0.0 |
| Pancreas | 0.0 |
| Pancreatic ca. CAPAN 2 | 0.0 |
| Pituitary gland | 0.0 |
| Placenta | 0.0 |
| Prostate | 0.0 |
| Prostate ca.* (bone met) PC-3 | 0.0 |
| Salivary gland | 0.0 |
| Trachea | 0.0 |
| Spinal cord | 0.0 |
| Testis | 0.0 |
| Thyroid | 0.0 |
| Uterus | 0.0 |
| Melanoma M14 | 0.0 |
| Melanoma LOX IMVI | 0.0 |
| Melanoma UACC-62 | 0.0 |
| Melanoma SK-MEL-28 | 0.0 |
| Melanoma* (met) SK-MEL-5 | 0.0 |
| Melanoma Hs688(A).T | 0.0 |
| Melanoma* (met) Hs688(B).T | 0.0 |

Column A - Rel. Exp. (%) Ag497, Run 121136178

[0627] TABLE IC
Panel 5 Islet

| Tissue Name | A |
|---|---|
| 97457_Patient-02go_adipose | 0.0 |
| 97476_Patient-07sk_skeletal muscle | 0.0 |
| 97477_Patient-07ut_uterus | 0.0 |
| 97478_Patient-07pl_placenta | 0.0 |
| 99167_Bayer Patient 1 | 0.0 |
| 97482_Patient-08ut_uterus | 0.0 |
| 97483_Patient-08pl_placenta | 0.0 |
| 97486_Patient-09sk_skeletal muscle | 0.0 |
| 97487_Patient-09ut_uterus | 0.0 |
| 97488_Patient-09pl_placenta | 0.0 |
| 97492_Patient-10ut_uterus | 0.0 |
| 97493_Patient-10pl_placenta | 12.5 |
| 97495_Patient-11go_adipose | 0.0 |
| 97496_Patient-11sk_skeletal muscle | 6.3 |
| 97497_Patient-11ut_uterus | 0.0 |
| 97498_Patient-11pl_placenta | 0.0 |
| 97500_Patient-12go_adipose | 0.0 |
| 97501_Patient-12sk_skeletal muscle | 100.0 |
| 97502_Patient-12ut_uterus | 8.1 |
| 97503_Patient-12pl_placenta | 0.0 |
| 94721_Donor 2 U - A_Mesenchymal Stem Cells | 1.3 |
| 94722_Donor 2 U - B_Mesenchymal Stem Cells | 0.0 |
| 94723_Donor 2 U - C_Mesenchymal Stem Cells | 0.0 |
| 94709_Donor 2 AM - A_adipose | 0.0 |
| 94710_Donor 2 AM - B_adipose | 0.0 |
| 94711_Donor 2 AM - C_adipose | 0.0 |
| 94712_Donor 2 AD - A_adipose | 0.0 |
| 94713_Donor 2 AD - B_adipose | 0.0 |
| 94714_Donor 2 AD - C_adipose | 0.0 |
| 94742_Donor 3 U - A_Mesenchymal Stem Cells | 0.0 |
| 94743_Donor 3 U - B_Mesenchymal Stem Cells | 0.0 |
| 94730_Donor 3 AM - A_adipose | 10.5 |
| 94731_Donor 3 AM - B_adipose | 0.0 |
| 94732_Donor 3 AM - C_adipose | 0.0 |
| 94733_Donor 3 AD - A_adipose | 0.0 |
| 94734_Donor 3 AD - B_adipose | 24.1 |
| 94735_Donor 3 AD - C_adipose | 0.0 |
| 77138_Liver_HepG2untreated | 0.0 |
| 73556_Heart_Cardiac stromal cells (primary) | 0.0 |
| 81735_Small Intestine | 20.7 |
| 72409_Kidney_Proximal Convoluted Tubule | 0.0 |
| 82685_Small intestine_Duodenum | 0.0 |
| 90650_Adrenal_Adrenocortical adenoma | 0.0 |
| 72410_Kidney_HRCE | 0.0 |
| 72411_Kidney_HRE | 0.0 |
| 73139_Uterus_Uterine smooth muscle cells | 0.0 |

Column A - Rel. Exp. (%) Ag497, Run 323591176

Panel 1.1 Summary: Ag497 Low expression of the CG55274-05 gene was restricted to the ovarian cancer cell line OVCAR-5 (CT=33.6). Gene or protein expression levels are useful as a marker to detect the presence of ovarian cancer. Therapeutic modulation of the activity of this gene or its protein product is useful in the treatment of ovarian cancer.
Panel 5 Islet Summary: Ag497 Low expression of this gene was mainly detected in a skeletal muscle sample from a diabetic patient on insulin (CT=33.6). The CG55274-05 gene encodes Diazepam-binding inhibitor, a member of the endozepine/acetyl CoA binding protein (ACBP)/diazepam binding inhibitor (DBI) family. ACBP is known to affect intracellular calcium levels via release from the sarcoplasmic reticulum in muscle, via the ryanodine receptor, and possibly the mitochondria (Fulceri R, Knudsen J, Giunti R, Volpe P, Nori A, Benedetti A. Fatty acyl-CoA-acyl-CoA-binding protein complexes activate the Ca2+ release channel of skeletal muscle sarcoplasmic reticulum. Biochem J Jul. 15, 1997;325 (Pt 2):423-8; Fulceri R, Giunti R, Knudsen J, Leuzzi R, Kardon T, Benedetti A. Rapamycin inhibits activation of ryanodine receptors from skeletal muscle by the fatty acyl CoA-acyl CoA binding protein complex. Biochem Biophys Res Commun Oct. 22, 1999;264(2):409-12). Since the activity of many metabolic enzymes is regulated by intracellular calcium, ACBP could play an important role in many aspects of energy metabolism. Furthermore, the peptides produced from ACBP act as hormones or paracrine factors to influence metabolism globally. One ACBP-derived peptide (octadecaneuropeptide: ODN-ACBP33-50) exerts this action through several mechanisms. One mechanism influences nutrient absorption through the stimulation of CCK secretion and the subsequent secretion by the exocrine pancreas (Herzig K H; Schon I; Tatemoto K; Ohe Y; Li Y; Folsch U R; Owyang C. Diazepam binding inhibitor is a potent cholecystokinin-releasing peptide in the intestine. Proc. Nat. Acad. Sci. 1996; 93: 7927-7932). At the same time ODN inhibits glucose-stimulated insulin secretion from the endocrine pancreas [10]. In addition, intracerebroventricular administration of ODN has anorexigenic effects in rats (de Mateos-Verchere J G, Leprince J, Tonon M C, Vaudry H, Costentin J. The octadecaneuropeptide [diazepam-binding inhibitor (33-50)] exerts potent anorexigenic effects in rodents. Eur J Pharmacol Mar. 2, 2001;414(2-3):225-31). Full-length ACBP and peptides derived from the parent polypeptide participate in several different feedback loops influencing metabolism at many levels. Based upon the specific expression of this gene in skeletal muscle from diabetic patient and that ODN has broad-ranging effects on physiologic processes, ODN-related peptides from the CG55274-05 gene, encoding an ACBP-like protein, are potential protein therapeutics for the treatment of metabolic disorders such as obesity and diabetes.

[0630] J. CG55379-01 and CG55379-04: hNOPE

[0631] Expression of gene CG55379-01 and CG55379-04 was assessed using the primer-probe set Ag902, described in Table JA. Results of the RTQ-PCR runs are shown in Tables JB, JC, JD, JE, JF, JG and JH.

TABLE JA
Probe Name Ag902

| | | | Start | SEQ ID |
|---|---|---|---|---|
| Primers | Sequences | Length | Position | No |
| Forward | 5′-atcaaacagctccacatc | 21 | 2289 | 316 |
| | cat-3′ | | | |
| Probe | TET-5′-aaaagccagatttc | 26 | 2324 | 317 |
| | accacagtcaag-3′-TAMRA | | | |
| Reverse | 5′-agcgcacagtgtagttga | 22 | 2350 | 318 |
| | caat-3′ | | | |

[0632] TABLE JB
CNS neurodegeneration v1.0

| Tissue Name | A |
|---|---|
| AD 1 Hippo | 53.2 |
| AD 2 Hippo | 62.4 |
| AD 3 Hippo | 27.0 |
| AD 4 Hippo | 38.2 |
| AD 5 Hippo | 19.8 |
| AD 6 Hippo | 63.3 |
| Control 2 Hippo | 31.9 |
| Control 4 Hippo | 100.0 |
| Control (Path) 3 Hippo | 28.5 |
| AD 1 Temporal Ctx | 50.3 |
| AD 2 Temporal Ctx | 56.6 |
| AD 3 Temporal Ctx | 41.2 |
| AD 4 Temporal Ctx | 35.4 |
| AD 5 Inf Temporal Ctx | 27.2 |
| AD 5 Sup Temporal Ctx | 48.0 |
| AD 6 Inf Temporal Ctx | 38.7 |
| AD 6 Sup Temporal Ctx | 46.0 |
| Control 1 Temporal Ctx | 17.4 |
| Control 2 Temporal Ctx | 25.0 |
| Control 3 Temporal Ctx | 25.0 |
| Control 3 Temporal Ctx | 53.6 |
| Control (Path) 1 Temporal Ctx | 23.5 |
| Control (Path) 2 Temporal Ctx | 27.7 |
| Control (Path) 3 Temporal Ctx | 34.9 |
| Control (Path) 4 Temporal Ctx | 27.2 |
| AD 1 Occipital Ctx | 24.8 |
| AD 2 Occipital Ctx (Missing) | 4.6 |
| AD 3 Occipital Ctx | 26.8 |
| AD 4 Occipital Ctx | 29.3 |
| AD 5 Occipital Ctx | 22.4 |
| AD 6 Occipital Ctx | 20.9 |
| Control 1 Occipital Ctx | 29.1 |
| Control 2 Occipital Ctx | 24.3 |
| Control 3 Occipital Ctx | 24.8 |
| Control 4 Occipital Ctx | 56.6 |
| Control (Path) 1 Occipital Ctx | 31.2 |
| Control (Path) 2 Occipital Ctx | 17.2 |
| Control (Path) 3 Occipital Ctx | 26.8 |
| Control (Path) 4 Occipital Ctx | 19.5 |
| Control 1 Parietal Ctx | 30.1 |
| Control 2 Parietal Ctx | 41.2 |
| Control 3 Parietal Ctx | 28.7 |
| Control (Path) 1 Parietal Ctx | 25.5 |
| Control (Path) 2 Parietal Ctx | 34.6 |
| Control (Path) 3 Parietal Ctx | 45.4 |
| Control (Path) 4 Parietal Ctx | 29.9 |

Column A - Rel. Exp. (%) Ag902, Run 207567448

[0633] TABLE JC
General screening panel v1.4

| Tissue Name | A |
|---|---|
| Adipose | 2.6 |
| Melanoma* Hs688(A).T | 9.1 |
| Melanoma* Hs688(B).T | 8.7 |
| Melanoma* M14 | 0.2 |
| Melanoma* LOXIMVI | 0.0 |
| Melanoma* SK-MEL-5 | 0.5 |
| Squamous cell carcinoma SCC-4 | 0.2 |
| Testis Pool | 14.2 |
| Prostate ca.* (bone met) PC-3 | 3.0 |
| Prostate Pool | 1.6 |
| Placenta | 63.3 |
| Uterus Pool | 2.4 |
| Ovarian ca. OVCAR-3 | 0.4 |
| Ovarian ca: SK-OV-3 | 4.5 |
| Ovarian ca. OVCAR-4 | 3.4 |
| Ovarian ca. OVCAR-5 | 6.9 |
| Ovarian ca. IGROV-1 | 1.4 |
| Ovarian ca. OVCAR-8 | 14.7 |
| Ovary | 26.6 |
| Breast ca. MCF-7 | 0.4 |
| Breast ca. MDA-MB-231 | 9.9 |
| Breast ca. BT 549 | 1.2 |
| Breast ca. T47D | 12.2 |
| Breast ca. MDA-N | 0.0 |
| Breast Pool | 12.9 |
| Trachea | 3.6 |
| Lung | 10.6 |
| Fetal Lung | 75.8 |
| Lung ca. NCI-N417 | 0.9 |
| Lung ca. LX-1 | 3.8 |
| Lung ca. NCI-H146 | 0.3 |
| Lung ca. SHP-77 | 1.6 |
| Lung ca. A549 | 5.5 |
| Lung ca. NCI-H526 | 1.1 |
| Lung ca. NCI-H23 | 7.3 |
| Lung ca. NCI-H460 | 0.4 |
| Lung ca. HOP-62 | 3.1 |
| Lung ca. NCI-H522 | 47.6 |
| Liver | 0.0 |
| Fetal Liver | 29.1 |
| Liver ca. HepG2 | 0.2 |
| Kidney Pool | 11.0 |
| Fetal Kidney | 22.8 |
| Renal ca. 786-0 | 0.7 |
| Renal ca. A498 | 0.6 |
| Renal ca. ACHN | 7.2 |
| Renal ca. UO-31 | 45.7 |
| Renal ca. TK-10 | 32.8 |
| Bladder | 3.9 |
| Gastric ca. (liver met.) NCI-N87 | 0.2 |
| Gastric ca. KATO III | 0.1 |
| Colon ca. SW-948 | 0.2 |
| Colon ca. SW480 | 6.4 |
| Colon ca.* (SW480 met) SW620 | 4.0 |
| Colon ca. HT29 | 0.0 |
| Colon ca. HCT-116 | 0.4 |
| Colon ca. CaCo-2 | 7.0 |
| Colon cancer tissue | 4.4 |
| Colon ca. SW1116 | 0.0 |
| Colon ca. Colo-205 | 0.1 |
| Colon ca. SW-48 | 0.0 |
| Colon Pool | 6.8 |
| Small Intestine Pool | 6.4 |
| Stomach Pool | 10.9 |
| Bone Marrow Pool | 9.6 |
| Fetal Heart | 7.2 |
| Heart Pool | 4.8 |
| Lymph Node Pool | 13.5 |
| Fetal Skeletal Muscle | 67.8 |
| Skeletal Muscle Pool | 25.7 |
| Spleen Pool | 2.9 |
| Thymus Pool | 9.9 |
| CNS cancer (glio/astro) U87-MG | 10.2 |
| CNS cancer (glio/astro) U-118-MG | 24.7 |
| CNS cancer (neuro; met) SK-N-AS | 14.0 |
| CNS cancer (astro) SF-539 | 9.4 |
| CNS cancer (astro) SNB-75 | 39.2 |
| CNS cancer (glio) SNB-19 | 1.4 |
| CNS cancer (glio) SF-295 | 4.6 |
| Brain (Amygdala) Pool | 8.5 |
| Brain (cerebellum) | 6.7 |
| Brain (fetal) | 62.0 |
| Brain (Hippocampus) Pool | 19.5 |
| Cerebral Cortex Pool | 8.7 |
| Brain (Substantia nigra) Pool | 10.2 |
| Brain (Thalamus) Pool | 12.8 |
| Brain (whole) | 11.3 |
| Spinal Cord Pool | 20.9 |
| Adrenal Gland | 32.8 |
| Pituitary gland Pool | 2.7 |
| Salivary Gland | 0.5 |
| Thyroid (female) | 6.9 |
| Pancreatic ca. CAPAN2 | 100.0 |
| Pancreas Pool | 5.3 |

Column A - Rel. Exp. (%) Ag902, Run 214145283

[0634] TABLE JD
HASS Panel v1.0

| Tissue Name | A |
|---|---|
| MCF-7 C1 | 0.1 |
| MCF-7 C2 | 0.1 |
| MCF-7 C3 | 0.1 |
| MCF-7 C4 | 0.1 |
| MCF-7 C5 | 0.1 |
| MCF-7 C6 | 0.1 |
| MCF-7 C7 | 0.1 |
| MCF-7 C9 | 0.0 |
| MCF-7 C10 | 0.1 |
| MCF-7 C11 | 0.1 |
| MCF-7 C12 | 0.2 |
| MCF-7 C13 | 0.2 |
| MCF-7 C15 | 0.0 |
| MCF-7 C16 | 0.2 |
| MCF-7 C17 | 0.2 |
| T24 D1 | 0.0 |
| T24 D2 | 0.0 |
| T24 D3 | 0.1 |
| T24 D4 | 0.0 |
| T24 D5 | 0.0 |
| T24 D6 | 0.1 |
| T24 D7 | 0.1 |
| T24 D9 | 0.2 |
| T24 D10 | 0.0 |
| T24 D11 | 0.2 |
| T24 D12 | 0.1 |
| T24 D13 | 0.0 |
| T24 D15 | 0.0 |
| T24 D16 | 0.1 |
| T24 D17 | 0.4 |
| CAPaN B1 | 70.7 |
| CAPaN B2 | 45.1 |
| CAPaN B3 | 23.3 |
| CAPaN B4 | 31.6 |
| CAPaN B5 | 67.4 |
| CAPaN B6 | 50.3 |
| CAPaN B7 | 34.2 |
| CAPaN B8 | 69.3 |
| CAPaN B9 | 78.5 |
| CAPaN B10 | 47.0 |
| CAPaN B11 | 79.0 |
| CAPaN B12 | 45.1 |
| CAPaN B13 | 38.7 |
| CAPaN B14 | 42.0 |
| CAPaN B15 | 45.1 |
| CAPaN B16 | 52.9 |
| CAPaN B17 | 52.9 |
| U87-MG F1 (B) | 0.4 |
| U87-MG F2 | 0.4 |
| U87-MG F3 | 3.3 |
| U87-MG F4 | 0.2 |
| U87-MG F5 | 2.3 |
| U87-MG F6 | 11.6 |
| U87-MG F7 | 0.9 |
| U87-MG F8 | 4.4 |
| U87-MG F9 | 0.7 |
| U87-MG F10 | 2.0 |
| U87-MG F11 | 11.4 |
| U87-MG F12 | 1.8 |
| U87-MG F13 | 3.0 |
| U87-MG F14 | 9.7 |
| U87-MG F15 | 1.5 |
| U87-MG F16 | 2.4 |
| U87-MG F17 | 3.0 |
| LnCAP A1 | 0.1 |
| LnCAP A2 | 0.1 |
| LnCAP A3 | 0.0 |
| LnCAP A4 | 0.0 |
| LnCAP A5 | 0.0 |
| LnCAP A6 | 0.0 |
| LnCAP A7 | 0.0 |
| LnCAP A8 | 0.2 |
| LnCAP A9 | 0.2 |
| LnCAP A10 | 0.0 |
| LnCAP A11 | 0.4 |
| LnCAP A12 | 0.0 |
| LnCAP A13 | 0.0 |
| LnCAP A14 | 0.2 |
| LnCAP A15 | 0.3 |
| LnCAP A16 | 0.1 |
| LnCAP A17 | 0.3 |
| Primary Astrocytes | 10.0 |
| Primary Renal Proximal Tubule Epithelial cell A2 | 10.2 |
| Primary melanocytes A5 | 0.0 |
| 126443 - 341 medullo | 0.5 |
| 126444 - 487 medullo | 19.6 |
| 126445 - 425 medullo | 7.5 |
| 126446 - 690 medullo | 14.7 |
| 126447 - 54 adult glioma | 10.4 |
| 126448 - 245 adult glioma | 3.6 |
| 126449 - 317 adult glioma | 100.0 |
| 126450 - 212 glioma | 52.1 |
| 126451 - 456 glioma | 23.0 |

Column A - Rel. Exp. (%) Ag902, Run 273142965

[0635] TABLE JE
Panel 2D

| Tissue Name | A | B |
|---|---|---|
| Normal Colon | 24.1 | 28.9 |
| CC Well to Mod Diff (ODO3866) | 4.1 | 5.0 |
| CC Margin (ODO3866) | 5.9 | 3.6 |
| CC Gr.2 rectosigmoid (ODO3868) | 4.6 | 4.0 |
| CC Margin (ODO3868) | 1.3 | 1.2 |
| CC Mod Diff (ODO3920) | 19.6 | 19.5 |
| CC Margin (ODO3920) | 6.2 | 9.3 |
| CC Gr.2 ascend colon (ODO3921) | 25.9 | 34.2 |
| CC Margin (ODO3921) | 6.7 | 7.2 |
| CC from Partial Hepatectomy (ODO4309) Mets | 3.3 | 2.6 |
| Liver Margin (ODO4309) | 0.8 | 0.6 |
| Colon mets to lung (OD04451-01) | 5.0 | 3.2 |
| Lung Margin (OD04451-02) | 0.6 | 0.0 |
| Normal Prostate 6546-1 | 4.8 | 3.0 |
| Prostate Cancer (OD04410) | 3.5 | 3.9 |
| Prostate Margin (OD04410) | 6.0 | 6.8 |
| Prostate Cancer (OD04720-01) | 0.9 | 1.2 |
| Prostate Margin (OD04720-02) | 6.3 | 2.4 |
| Normal Lung 061010 | 16.5 | 18.6 |
| Lung Met to Muscle (ODO4286) | 31.4 | 28.1 |
| Muscle Margin (ODO4286) | 53.6 | 66.4 |
| Lung Malignant Cancer (OD03126) | 8.7 | 10.0 |
| Lung Margin (OD03126) | 8.8 | 4.6 |
| Lung Cancer (OD04404) | 7.2 | 9.2 |
| Lung Margin (OD04404) | 6.0 | 7.9 |
| Lung Cancer (OD04565) | 4.6 | 4.3 |
| Lung Margin (OD04565) | 1.7 | 0.9 |
| Lung Cancer (OD04237-01) | 22.4 | 16.8 |
| Lung Margin (OD04237-02) | 1.5 | 1.9 |
| Ocular Mel Met to Liver (ODO4310) | 1.4 | 1.4 |
| Liver Margin (ODO4310) | 0.1 | 0.2 |
| Melanoma Mets to Lung (OD04321) | 0.3 | 0.6 |
| Lung Margin (OD04321) | 1.2 | 2.1 |
| Normal Kidney | 3.6 | 4.7 |
| Kidney Ca, Nuclear grade 2 (OD04338) | 78.5 | 72.2 |
| Kidney Margin (OD04338) | 4.2 | 6.0 |
| Kidney Ca Nuclear grade 1/2 (OD04339) | 62.0 | 54.3 |
| Kidney Margin (OD04339) | 3.0 | 2.9 |
| Kidney Ca, Clear cell type (OD04340) | 0.5 | 1.2 |
| Kidney Margin (OD04340) | 3.5 | 3.7 |
| Kidney Ca, Nuclear grade 3 (OD04348) | 7.5 | 9.5 |
| Kidney Margin (OD04348) | 3.1 | 4.2 |
| Kidney Cancer (OD04622-01) | 100.0 | 100.0 |
| Kidney Margin (OD04622-03) | 0.0 | 0.6 |
| Kidney Cancer (OD04450-01) | 11.2 | 12.7 |
| Kidney Margin (OD04450-03) | 2.0 | 3.2 |
| Kidney Cancer 8120607 | 7.1 | 6.7 |
| Kidney Margin 8120608 | 0.5 | 0.8 |
| Kidney Cancer 8120613 | 1.6 | 0.9 |
| Kidney Margin 8120614 | 1.5 | 1.2 |
| Kidney Cancer 9010320 | 90.8 | 88.3 |
| Kidney Margin 9010321 | 5.1 | 4.1 |
| Normal Uterus | 9.5 | 6.7 |
| Uterus Cancer 064011 | 20.9 | 18.9 |
| Normal Thyroid | 42.9 | 41.2 |
| Thyroid Cancer 064010 | 11.8 | 16.6 |
| Thyroid Cancer A302152 | 12.8 | 9.9 |
| Thyroid Margin A302153 | 9.5 | 14.4 |
| Normal Breast | 16.5 | 18.9 |
| Breast Cancer (OD04566) | 2.5 | 4.0 |
| Breast Cancer (OD04590-01) | 5.7 | 3.1 |
| Breast Cancer Mets (OD04590-03) | 8.2 | 6.9 |
| Breast Cancer Metastasis (OD04655-05) | 5.4 | 3.4 |
| Breast Cancer 064006 | 11.3 | 8.4 |
| Breast Cancer 1024 | 28.7 | 34.4 |
| Breast Cancer 9100266 | 11.1 | 12.2 |
| Breast Margin 9100265 | 21.9 | 27.9 |
| Breast Cancer A209073 | 27.2 | 19.5 |
| Breast Margin A209073 | 20.4 | 17.1 |
| Normal Liver | 0.4 | 0.3 |
| Liver Cancer 064003 | 0.3 | 0.8 |
| Liver Cancer 1025 | 0.0 | 0.0 |
| Liver Cancer 1026 | 2.8 | 3.2 |
| Liver Cancer 6004-T | 0.2 | 0.4 |
| Liver Tissue 6004-N | 2.1 | 0.3 |
| Liver Cancer 6005-T | 1.1 | 3.9 |
| Liver Tissue 6005-N | 0.5 | 0.0 |
| Normal Bladder | 13.1 | 10.7 |
| Bladder Cancer 1023 | 1.2 | 2.5 |
| Bladder Cancer A302173 | 3.5 | 4.7 |
| Bladder Cancer (OD04718-01) | 6.1 | 7.6 |
| Bladder Normal Adjacent (OD04718-03) | 33.9 | 24.7 |
| Normal Ovary | 43.5 | 48.0 |
| Ovarian Cancer 064008 | 32.1 | 26.4 |
| Ovarian Cancer (OD04768-07) | 4.6 | 3.3 |
| Ovary Margin (OD04768-08) | 5.7 | 4.7 |
| Normal Stomach | 13.6 | 16.7 |
| Gastric Cancer 9060358 | 12.1 | 16.5 |
| Stomach Margin 9060359 | 8.5 | 9.9 |
| Gastric Cancer 9060395 | 14.5 | 12.9 |
| Stomach Margin 9060394 | 14.1 | 14.1 |
| Gastric Cancer 9060397 | 6.3 | 8.2 |
| Stomach Margin 9060396 | 3.0 | 3.3 |
| Gastric Cancer 064005 | 11.9 | 6.4 |

Column A - Rel. Exp. (%) Ag902, Run 146087175
Column B - Rel. Exp. (%) Ag902, Run 151091474

[0636] TABLE JF
Panel 3D

| Tissue Name | A |
|---|---|
| Daoy- Medulloblastoma | 4.8 |
| TE671- Medulloblastoma | 39.8 |
| D283 Med- Medulloblastoma | 49.3 |
| PFSK-1- Primitive Neuroectodermal | 0.0 |
| XF-498- CNS | 0.0 |
| SNB-78- Glioma | 12.6 |
| SF-268- Glioblastoma | 0.8 |
| T98G- Glioblastoma | 0.0 |
| SK-N-SH- Neuroblastoma (metastasis) | 0.5 |
| SF-295- Glioblastoma | 1.2 |
| Cerebellum | 8.1 |
| Cerebellum | 4.4 |
| NCI-H292- Mucoepidermoid lung carcinoma | 0.7 |
| DMS-114- Small cell lung cancer | 9.7 |
| DMS-79- Small cell lung cancer | 24.5 |
| NCI-H146- Small cell lung cancer | 2.2 |
| NCI-H526- Small cell lung cancer | 11.4 |
| NCI-N417- Small cell lung cancer | 5.3 |
| NCI-H82- Small cell lung cancer | 13.1 |
| NCI-H157- Squamous cell lung cancer (metastasis) | 0.0 |
| NCI-H1155- Large cell lung cancer | 16.2 |
| NCI-H1299- Large cell lung cancer | 2.4 |
| NCI-H727- Lung carcinoid | 1.7 |
| NCI-UMC-11- Lung carcinoid | 3.1 |
| LX-1- Small cell lung cancer | 5.1 |
| Colo-205- Colon cancer | 1.6 |
| KM12- Colon cancer | 0.0 |
| KM20L2- Colon cancer | 3.4 |
| NCI-H716- Colon cancer | 100.0 |
| SW-48- Colon adenocarcinoma | 0.0 |
| SW1116- Colon adenocarcinoma | 0.0 |
| LS 174T- Colon adenocarcinoma | 8.8 |
| SW-948- Colon adenocarcinoma | 0.0 |
| SW-480- Colon adenocarcinoma | 0.0 |
| NCI-SNU-5- Gastric carcinoma | 5.4 |
| KATO III- Gastric carcinoma | 1.9 |
| NCI-SNU-16- Gastric carcinoma | 10.7 |
| NCI-SNU-1- Gastric carcinoma | 0.0 |
| RF-1- Gastric adenocarcinoma | 0.7 |
| RF-48- Gastric adenocarcinoma | 1.4 |
| MKN-45- Gastric carcinoma | 0.9 |
| NCI-N87- Gastric carcinoma | 0.0 |
| OVCAR-5- Ovarian carcinoma | 1.0 |
| RL95-2- Uterine carcinoma | 0.0 |
| HelaS3- Cervical adenocarcinoma | 0.7 |
| Ca Ski- Cervical epidermoid carcinoma (metastasis) | 0.0 |
| ES-2- Ovarian clear cell carcinoma | 0.0 |
| Ramos- Stimulated with PMA/ionomycin 6h | 0.0 |
| Ramos- Stimulated with PMA/ionomycin 14h | 0.0 |
| MEG-01- Chronic myelogenous leukemia (megokaryoblast) | 2.2 |
| Raji- Burkitt's lymphoma | 0.0 |
| Daudi- Burkitt's lymphoma | 0.8 |
| U266- B-cell plasmacytoma | 0.0 |
| CA46- Burkitt's lymphoma | 1.3 |
| RL- non-Hodgkin's B-cell lymphoma | 0.0 |
| JM1- pre-B-cell lymphoma | 0.0 |
| Jurkat- T cell leukemia | 0.0 |
| TF-1 - Erythroleukemia | 0.6 |
| HUT 78- T-cell lymphoma | 0.8 |
| U937- Histiocytic lymphoma | 0.7 |
| KU-812- Myelogenous leukemia | 0.0 |
| 769-P- Clear cell renal carcinoma | 0.0 |
| Caki-2- Clear cell renal carcinoma | 5.8 |
| SW 839- Clear cell renal carcinoma | 1.7 |
| Rhabdoid kidney tumor | 25.2 |
| Hs766T- Pancreatic carcinoma (LN metastasis) | 3.9 |
| CAPAN-1- Pancreatic adenocarcinoma (liver metastasis) | 3.1 |
| SU86.86- Pancreatic carcinoma (liver metastasis) | 25.9 |
| BxPC-3- Pancreatic adenocarcinoma | 0.0 |
| HPAC- Pancreatic adenocarcinoma | 2.9 |
| MIA PaCa-2- Pancreatic carcinoma | 0.0 |
| CFPAC-1- Pancreatic ductal adenocarcinoma | 6.3 |
| PANC-1- Pancreatic epithelioid ductal carcinoma | 8.5 |
| T24- Bladder carcinma (transitional cell) | 0.0 |
| 5637- Bladder carcinoma | 0.0 |
| HT-1197- Bladder carcinoma | 0.0 |
| UM-UC-3- Bladder carcinma (transitional cell) | 0.0 |
| A204- Rhabdomyosarcoma | 0.5 |
| HT-1080- Fibrosarcoma | 3.7 |
| MG-63- Osteosarcoma | 7.9 |
| SK-LMS-1- Leiomyosarcoma (vulva) | 2.2 |
| SJRH30- Rhabdomyosarcoma (met to bone marrow) | 33.4 |
| A431- Epidermoid carcinoma | 0.0 |
| WM266-4- Melanoma | 0.8 |
| DU 145- Prostate carcinoma (brain metastasis) | 0.8 |
| MDA-MB-468- Breast adenocarcinoma | 0.0 |
| SCC-4- Squamous cell carcinoma of tongue | 1.3 |
| SCC-9- Squamous cell carcinoma of tongue | 0.0 |
| SCC-15- Squamous cell carcinoma of tongue | 0.0 |
| CAL 27- Squamous cell carcinoma of tongue | 0.0 |

Column A - Rel. Exp. (%) Ag902, Run 164844768

[0637] TABLE JG
Panel 4.1D

| Tissue Name | A |
|---|---|
| Secondary Th1 act | 0.0 |
| Secondary Th2 act | 0.0 |
| Secondary Tr1 act | 0.2 |
| Secondary Th1 rest | 0.2 |
| Secondary Th2 rest | 0.3 |
| Secondary Tr1 rest | 0.0 |
| Primary Th1 act | 0.0 |
| Primary Th2 act | 0.1 |
| Primary Tr1 act | 0.0 |
| Primary Th1 rest | 0.4 |
| Primary Th2 rest | 0.0 |
| Primary Tr1 rest | 0.0 |
| CD45RA CD4 lymphocyte act | 1.7 |
| CD45RO CD4 lymphocyte act | 0.2 |
| CD8 lymphocyte act | 0.0 |
| Secondary CD8 lymphocyte rest | 0.3 |
| Secondary CD8 lymphocyte act | 0.0 |
| CD4 lymphocyte none | 0.0 |
| 2ry Th1/Th2/Tr1_anti-CD95 CH11 | 0.3 |
| LAK cells rest | 0.0 |
| LAK cells IL-2 | 0.0 |
| LAK cells IL-2 + IL-12 | 0.0 |
| LAK cells IL-2 + IFN gamma | 0.5 |
| LAK cells IL-2 + IL-18 | 0.7 |
| LAK cells PMA/ionomycin | 0.0 |
| NK Cells IL-2 rest | 0.8 |
| Two Way MLR 3 day | 0.8 |
| Two Way MLR 5 day | 0.0 |
| Two Way MLR 7 day | 0.0 |
| PBMC rest | 0.0 |
| PBMC PWM | 0.0 |
| PBMC PHA-L | 0.0 |
| Ramos (B cell) none | 0.2 |
| Ramos (B cell) ionomycin | 0.0 |
| B lymphocytes PWM | 0.0 |
| B lymphocytes CD40L and IL-4 | 0.2 |
| EOL-1 dbcAMP | 0.0 |
| EOL-1 dbcAMP PMA/ionomycin | 0.0 |
| Dendritic cells none | 0.0 |
| Dendritic cells LPS | 100.0 |
| Dendritic cells anti-CD40 | 0.0 |
| Monocytes rest | 0.0 |
| Monocytes LPS | 0.8 |
| Macrophages rest | 6.9 |
| Macrophages LPS | 1.0 |
| HUVEC none | 0.0 |
| HUVEC starved | 0.0 |
| HUVEC IL-1beta | 0.0 |
| HUVEC IFN gamma | 1.5 |
| HUVEC TNF alpha + IFN gamma | 0.0 |
| HUVEC TNF alpha + IL4 | 0.0 |
| HUVEC IL-11 | 0.0 |
| Lung Microvascular EC none | 0.4 |
| Lung Microvascular EC TNFalpha + IL-1beta | 0.3 |
| Microvascular Dermal EC none | 0.0 |
| Microsvasular Dermal EC TNFalpha + IL-1beta | 0.0 |
| Bronchial epithelium TNFalpha + IL1beta | 2.4 |
| Small airway epithelium none | 1.6 |
| Small airway epithelium TNFalpha + IL-1beta | 0.4 |
| Coronery artery SMC rest | 0.9 |
| Coronery artery SMC TNFalpha + IL-1beta | 1.4 |
| Astrocytes rest | 13.3 |
| Astrocytes TNFalpha + IL-1beta | 9.8 |
| KU-812 (Basophil) rest | 0.0 |
| KU-812 (Basophil) PMA/ionomycin | 0.0 |
| CCD1106 (Keratinocytes) none | 0.3 |
| CCD1106 (Keratinocytes) TNFalpha + IL-1beta | 0.0 |
| Liver cirrhosis | 0.1 |
| NCI-H292 none | 0.5 |
| NCI-H292 IL-4 | 0.0 |
| NCI-H292 IL-9 | 1.0 |
| NCI-H292 IL-13 | 0.0 |
| NCI-H292 IFN gamma | 0.3 |
| HPAEC none | 0.0 |
| HPAEC TNF alpha + IL-1 beta | 0.0 |
| Lung fibroblast none | 4.2 |
| Lung fibroblast TNF alpha + IL-1 beta | 14.5 |
| Lung fibroblast IL-4 | 4.1 |
| Lung fibroblast IL-9 | 3.0 |
| Lung fibroblast IL-13 | 4.2 |
| Lung fibroblast IFN gamma | 4.2 |
| Dermal fibroblast CCD1070 rest | 3.6 |
| Dermal fibroblast CCD1070 TNF alpha | 1.5 |
| Dermal fibroblast CCD1070 IL-1 beta | 2.2 |
| Dermal fibroblast IFN gamma | 9.5 |
| Dermal fibroblast IL-4 | 30.4 |
| Dermal Fibroblasts rest | 6.1 |
| Neutrophils TNFa + LPS | 0.0 |
| Neutrophils rest | 0.0 |
| Colon | 0.9 |
| Lung | 3.1 |
| Thymus | 8.4 |
| Kidney | 1.5 |

Column A - Rel. Exp. (%) Ag902, Run 184565260

[0638] TABLE JH
Panel 5D

| Tissue Name | A |
|---|---|
| 97457_Patient-02go_adipose | 2.0 |
| 97476_Patient-07sk_skeletal muscle | 12.9 |
| 97477_Patient-07ut_uterus | 0.0 |
| 97478_Patient-07pl_placenta | 39.5 |
| 97481_Patient-08sk_skeletal muscle | 8.8 |
| 97482_Patient-08ut_uterus | 0.8 |
| 97483_Patient-08pl_placenta | 25.2 |
| 97486_Patient-09sk_skeletal muscle | 9.0 |
| 97487_Patient-09ut_uterus | 2.3 |
| 97488_Patient-09pl_placenta | 27.5 |
| 97492_Patient-10ut_uterus | 0.6 |
| 97493_Patient-10pl_placenta | 80.7 |
| 97495_Patient-11go_adipose | 2.7 |
| 97496_Patient-11sk_skeletal muscle | 47.0 |
| 97497_Patient-11ut_uterus | 0.0 |
| 97498_Patient-11pl_placenta | 57.4 |
| 97500_Patient-12go_adipose | 5.1 |
| 97501_Patient-12sk_skeletal muscle | 100.0 |
| 97502_Patient-12ut_uterus | 1.3 |
| 97503_Patient-12pl_placenta | 35.4 |
| 94721_Donor 2 U - A_Mesenchymal Stem Cells | 3.5 |
| 94722_Donor 2 U - B_Mesenchymal Stem Cells | 1.8 |
| 94723_Donor 2 U - C_Mesenchymal Stem Cells | 3.7 |
| 94709_Donor 2 AM - A_adipose | 1.5 |
| 94710_Donor 2 AM - B_adipose | 3.0 |
| 94711_Donor 2 AM - C_adipose | 3.5 |
| 94712_Donor 2 AD - A_adipose | 5.0 |
| 94713_Donor 2 AD - B_adipose | 6.6 |
| 94714_Donor 2 AD - C_adipose | 6.7 |
| 94742_Donor 3 U - A_Mesenchymal Stem Cells | 2.8 |
| 94743_Donor 3 U - B_Mesenchymal Stem Cells | 6.0 |
| 94730_Donor 3 AM - A_adipose | 3.4 |
| 94731_Donor 3 AM - B_adipose | 2.8 |
| 94732_Donor 3 AM - C_adipose | 3.1 |
| 94733_Donor 3 AD - A_adipose | 9.5 |
| 94734_Donor 3 AD - B_adipose | 3.3 |
| 94735_Donor 3 AD - C_adipose | 8.0 |
| 77138_Liver_HepG2untreated | 6.2 |
| 73556_Heart_Cardiac stromal cells (primary) | 0.0 |
| 81735_Small Intestine | 5.0 |
| 72409_Kidney_Proximal Convoluted Tubule | 2.6 |
| 82685_Small intestine_Duodenum | 1.2 |
| 90650_Adrenal_Adrenocortical adenoma | 4.4 |
| 72410_Kidney_HRCE | 12.7 |
| 72411_Kidney_HRE | 36.9 |
| 73139_Uterus_Uterine smooth muscle cells | 4.2 |

Column A - Rel. Exp. (%) Ag902, Run 258659600

CNS_neurodegeneration_v1.0 Summary: Ag902 Expression of the CG55379-01 and CG55379-04 genes was upregulated in the temporal cortex of Alzheimer's disease patients compared to normal patients. Therefore, therapeutic modulation of the activity of these genes or their protein products using nucleic acid, protein, antibody and small molecule drugs is useful decreasing neuronal death that accompanies Alzheimer's disease.
General_screening_panel_v1.4 Summary: Ag902 Highest expression of these genes was detected in pancreatic cancer cell line CAPAN2 (CT=27). Moderate levels of expression of these genes were also seen in cluster of cell lines derived from gastric, colon, lung, renal, breast, ovarian, prostate, and brain cancers and melanomas. Gene or protein expression levels are useful as a marker to detect the presence of these cancers. Therapeutic modulation of the activity of these genes using nucleic acid, protein, antibody or small molecule drugs will be effective in the treatment of pancreatic, gastric, colon, lung, renal, breast, ovarian, prostate, melanoma and brain cancers.

[0641] Among tissues with metabolic or endocrine function, these genes were expressed at moderate levels in pancreas, adipose, adrenal gland, thyroid, pituitary gland, skeletal muscle, heart, fetal liver and the gastrointestinal tract. Therapeutic modulation of the activity of these genes or their protein products is useful in the treatment of endocrine/metabolically related diseases, such as obesity and diabetes.

[0642] In addition, these gene variants were expressed at moderate levels in all regions of the central nervous system examined, including amygdala, hippocampus, substantia nigra, thalamus, cerebellum, cerebral cortex, and spinal cord. The protein encoded by this gene is a homolog of mouse NOPE protein, which functions as a guidance receptor in the developing CNS (Salbaum J M, Kappen C., 2000, Cloning and expression of nope, a new mouse gene of the immunoglobulin superfamily related to guidance receptors. Genomics. 64(l):15-23, PMID: 10708514). Therapeutic modulation of the activity of these genes or their protein products is useful in the treatment of central nervous system disorders such as Alzheimer's disease, Parkinson's disease, epilepsy, multiple sclerosis, schizophrenia and depression.

[0643] Expression of these genes was higher in fetal tissues relative to adult tissues, especially in fetal liver, lung, and brain. The relative overexpression of these genes in fetal tissue indicates that the encoded proteins may enhance liver, lung and brain growth or development in the fetus and thus may also act in a regenerative capacity in the adult. Therefore, therapeutic modulation of these genes and/or encoded proteins is useful in treatment of liver, lung and brain related diseases.

[0644] HASS Panel v1.0 Summary: Ag902 Highest expression of the CG55379-01 and CG55379-04 genes was detected in glioma (CT=28). Moderate to low levels of expression of these variants were also seen in pancreatic cancer cell line CAPaN and glioblastoma/astrocytoma cell lines. The expression of these genes was not altered by oxygen deprivation, acidic conditions or a serum-starved environment. Therapeutic modulation of the activity of these variants are useful in the treatment of pancreatic cancer, medulloblastoma and glioma.

[0645] Panel 2D Summary: Ag902 Highest expression of these genes was detected in a kidney cancer sample (CTs=30). The CG55379-01 and CG55379-04 genes were overexpressed in 7/9 kidney cancer and 2/4 colon cancer samples relative to the corresponding normal adjacent tissues. Gene or protein expression levels are useful in the diagnosis of kidney and colon cancer. Therapeutic modulation of the activity of these variants or their protein products using nucleic acid, protein, antibody and small molecule drugs are useful in the treatment of kidney cancer.

[0646] Panel 3D Summary: Ag902 Highest expression of the CG55379-01 and CG55379-04 genes was detected in a colon cancer cell line (CT=30). These variants were also expressed in cancer cell lines derived from kidney, lung, brain, pancreas and bone cancers. This observation indicates a possible role for this gene in the pathogenesis of these cancers. Please see panel 2D for further discussion of this gene.

[0647] Panel 4.1D Summary: Ag902 Highest expression of these genes was detected in activated dendritic cells (CT=30). The expression of these variants was also induced in LPS-stimulated dendritic cells and in IL-4-stimulated dermal fibroblasts. Low expression of this gene was also seen in astrocytes and normal thymus. The CG55379-01 and CG55379-04 genes encodes variants homologous to the mouse NOPE protein, a guidance receptors (Salbaum J M, Kappen C., 2000, Cloning and expression of nope, a new mouse gene of the immunoglobulin superfamily related to guidance receptors. Genomics. 64(1):15-23, PMID: 10708514). These proteins may act as a receptor for dendritic cells and dermal fibroblasts and may control interactions between these cells and other cell types during antigen presentation or apoptosis similar to netrins (Livesey F. J., 1999, Netrins and netrin receptors. Cell Mol. Life Sci. 56: 62-68, PMID: 11213262). Therapeutic modulation of the activity of these variants or their protein products are useful in blocking inflammation in diseases such as asthma, arthritis, psoriasis, allergy and other diseases in which dendritic cell or dermal fibroblasts play important roles.

[0648] Panel 5D Summary: Ag902 Highest expression of these genes was seen in placenta of a diabetic patient on insulin (CT=32.3). Significant expression of these genes were also seen in placenta from diabetic and non-diabetic patients. Please see panel 1.4 for further discussion of this gene.

[0649] K. CG55688-01: Cyr61

[0650] Expression of gene CG55688-01 was assessed using the primer-probe set Ag1148, described in Table KA. Results of the RTQ-PCR runs are shown in Tables KB, KC, KD, KE, KF and KG.

TABLE KA
Probe Name Ag1148

| | | | Start | SEQ ID |
|---|---|---|---|---|
| Primers | Sequences | Length | Position | No |
| Forward | 5′-gtgtctgtgagaggcagc | 22 | 1683 | 319 |
| | tatc-3′ | | | |
| Probe | TET-5′-tgcactctaaactg | 29 | 1705 | 320 |
| | caaacagaaatca | | | |
| | gg-3′-TAMRA | | | |
| Reverse | 5′-ccccaaaagctacatttt | 22 | 1758 | 321 |
| | gata-3′ | | | |

[0651] TABLE KB
HASS Panel v1.0

| Tissue Name | A |
|---|---|
| MCF-7 C1 | 1.4 |
| MCF-7 C2 | 0.8 |
| MCF-7 C3 | 0.3 |
| MCF-7 C4 | 0.7 |
| MCF-7 C5 | 0.4 |
| MCF-7 C6 | 0.8 |
| MCF-7 C7 | 0.3 |
| MCF-7 C9 | 1.0 |
| MCF-7 C10 | 0.3 |
| MCF-7 C11 | 0.1 |
| MCF-7 C12 | 0.5 |
| MCF-7 C13 | 0.3 |
| MCF-7 C15 | 0.7 |
| MCF-7 C16 | 3.7 |
| MCF-7 C17 | 2.4 |
| T24 D1 | 65.5 |
| T24 D2 | 47.3 |
| T24 D3 | 34.2 |
| T24 D4 | 97.9 |
| T24 D5 | 38.7 |
| T24 D6 | 100.0 |
| T24 D7 | 52.1 |
| T24 D9 | 33.2 |
| T24 D10 | 20.7 |
| T24 D11 | 35.8 |
| T24 D12 | 92.7 |
| T24 D13 | 29.3 |
| T24 D15 | 67.8 |
| T24 D16 | 74.7 |
| T24 D17 | 62.9 |
| CAPaN B1 | 1.7 |
| CAPaN B2 | 1.2 |
| CAPaN B3 | 0.3 |
| CAPaN B4 | 0.7 |
| CAPaN B5 | 0.6 |
| CAPaN B6 | 2.7 |
| CAPaN B7 | 1.2 |
| CAPaN B8 | 0.3 |
| CAPaN B9 | 2.1 |
| CAPaN B10 | 2.4 |
| CAPaN B11 | 1.1 |
| CAPaN B12 | 3.4 |
| CAPaN B13 | 2.3 |
| CAPaN B14 | 0.4 |
| CAPaN B15 | 2.7 |
| CAPaN B16 | 3.7 |
| CAPaN B17 | 6.7 |
| U87-MG F1 (B) | 0.3 |
| U87-MG F2 | 0.9 |
| U87-MG F3 | 0.5 |
| U87-MG F4 | 1.8 |
| U87-MG F5 | 21.8 |
| U87-MG F6 | 1.3 |
| U87-MG F7 | 1.8 |
| U87-MG F8 | 0.2 |
| U87-MG F9 | 5.0 |
| U87-MG F10 | 4.0 |
| U87-MG F11 | 1.4 |
| U87-MG F12 | 20.3 |
| U87-MG F13 | 2.8 |
| U87-MG F14 | 0.4 |
| U87-MG F15 | 16.7 |
| U87-MG F16 | 25.7 |
| U87-MG F17 | 34.2 |
| LnCAP A1 | 1.4 |
| LnCAP A2 | 0.7 |
| LnCAP A3 | 0.5 |
| LnCAP A4 | 0.7 |
| LnCAP A5 | 0.4 |
| LnCAP A6 | 1.3 |
| LnCAP A7 | 0.4 |
| LnCAP A8 | 0.6 |
| LnCAP A9 | 0.3 |
| LnCAP A10 | 1.2 |
| LnCAP A11 | 1.2 |
| LnCAP A12 | 0.2 |
| LnCAP A13 | 0.4 |
| LnCAP A14 | 0.1 |
| LnCAP A15 | 0.1 |
| LnCAP A16 | 0.7 |
| LnCAP A17 | 0.6 |
| Primary Astrocytes | 52.1 |
| Primary Renal Proximal Tubule Epithelial cell A2 | 14.0 |
| Primary melanocytes A5 | 25.2 |
| 126443 - 341 medullo | 0.1 |
| 126444 - 487 medullo | 1.7 |
| 126445 - 425 medullo | 1.7 |
| 126446 - 690 medullo | 0.4 |
| 126447 - 54 adult glioma | 29.7 |
| 126448 - 245 adult glioma | 2.6 |
| 126449 - 317 adult glioma | 2.4 |
| 126450 - 212 glioma | 6.8 |
| 126451 - 456 glioma | 0.3 |

Column A - Rel. Exp. (%) Ag1148, Run 268362647

[0652] TABLE KC
PGI1.0

| Tissue Name | A |
|---|---|
| 162191_Normal Lung 1 (IBS) | 0.8 |
| 160468_MD lung | 1.3 |
| 156629_MD Lung 13 | 0.3 |
| 162570_Normal Lung 4 (Aastrand) | 0.8 |
| 162571_Normal Lung 3 (Aastrand) | 0.0 |
| 162187_Fibrosis Lung 2 (Genomic Collaborative) | 9.3 |
| 151281_Fibrosis lung 11(Ardais) | 78.5 |
| 162186_Fibrosis Lung 1 (Genomic Collaborative) | 93.3 |
| 162190_Asthma Lung 4 (Genomic Collaborative) | 17.8 |
| 160467_Asthma Lung 13 (MD) | 0.7 |
| 137027_Emphysema Lung 1 (Ardais) | 0.8 |
| 137028_Emphysema Lung 2 (Ardais) | 3.5 |
| 137040_Emphysema Lung 3 (Ardais) | 24.1 |
| 137041_Emphysema Lung 4 (Ardais) | 3.4 |
| 137043_Emphysema Lung 5 (Ardais) | 12.5 |
| 142817_Emphysema Lung 6 (Ardais) | 34.2 |
| 142818_Emphysema Lung 7 (Ardais) | 16.7 |
| 142819_Emphysema Lung 8 (Ardais) | 36.9 |
| 142820_Emphysema Lung 9 (Ardais) | 3.2 |
| 142821_Emphysema Lung 10 (Ardais) | 21.0 |
| 162185_Emphysema Lung 12 (Ardais) | 73.7 |
| 162184_Emphysema Lung 13 (Ardais) | 44.4 |
| 162183_Emphysema Lung 14 (Ardais) | 100.0 |
| 162188_Emphysema Lung 15 (Genomic Collaborative) | 65.1 |
| 162177_NAT UC Colon 1 (Ardais) | 4.9 |
| 162176_UC Colon 1 (Ardais) | 8.1 |
| 162179_NAT UC Colon 2(Ardais) | 4.4 |
| 162178_UC Colon 2(Ardais) | 36.3 |
| 162181_NAT UC Colon 3(Ardais) | 31.6 |
| 162180_UC Colon 3(Ardais) | 24.5 |
| 162182_NAT UC Colon 4 (Ardais) | 2.7 |
| 137042_UC Colon 1108 | 4.8 |
| 137029_UC Colon 8215 | 14.4 |
| 137031_UC Colon 8217 | 33.9 |
| 137036_UC Colon 1137 | 10.2 |
| 137038_UC Colon 1491 | 43.2 |
| 137039_UC Colon 1546 | 92.0 |
| 162593_Crohn's 47751 (NDRI) | 0.2 |
| 162594_NAT Crohn's 47751 (NDRI) | 0.9 |

Column A - Rel. Exp. (%) Ag1148, Run 398125354

[0653] TABLE KD
Panel 1.3D

| Tissue Name | A |
|---|---|
| Liver adenocarcinoma | 4.5 |
| Pancreas | 1.8 |
| Pancreatic ca. CAPAN 2 | 0.6 |
| Adrenal gland | 6.3 |
| Thyroid | 11.2 |
| Salivary gland | 1.5 |
| Pituitary gland | 1.3 |
| Brain (fetal) | 0.8 |
| Brain (whole) | 1.4 |
| Brain (amygdala) | 0.8 |
| Brain (cerebellum) | 0.1 |
| Brain (hippocampus) | 5.9 |
| Brain (substantia nigra) | 1.7 |
| Brain (thalamus) | 1.2 |
| Cerebral Cortex | 1.5 |
| Spinal cord | 2.0 |
| glio/astro U87-MG | 0.7 |
| glio/astro U-118-MG | 19.6 |
| astrocytoma SW1783 | 21.8 |
| neuro*; met SK-N-AS | 0.8 |
| astrocytoma SF-539 | 16.3 |
| astrocytoma SNB-75 | 11.3 |
| glioma SNB-19 | 8.4 |
| glioma U251 | 10.2 |
| glioma SF-295 | 5.6 |
| Heart (fetal) | 28.9 |
| Heart | 9.5 |
| Skeletal muscle (fetal) | 14.1 |
| Skeletal muscle | 3.3 |
| Bone marrow | 1.7 |
| Thymus | 1.2 |
| Spleen | 12.6 |
| Lymph node | 21.3 |
| Colorectal | 8.6 |
| Stomach | 5.2 |
| Small intestine | 9.9 |
| Colon ca. SW480 | 2.6 |
| Colon ca.* SW620(SW480 met) | 0.1 |
| Colon ca. HT29 | 0.1 |
| Colon ca. HCT-116 | 1.0 |
| Colon ca. CaCo-2 | 0.7 |
| Colon ca. tissue(ODO3866) | 9.8 |
| Colon ca. HCC-2998 | 0.6 |
| Gastric ca.* (liver met) NCI-N87 | 3.0 |
| Bladder | 2.5 |
| Trachea | 17.9 |
| Kidney | 1.8 |
| Kidney (fetal) | 9.9 |
| Renal ca. 786-0 | 13.0 |
| Renal ca. A498 | 11.1 |
| Renal ca. RXF 393 | 20.2 |
| Renal ca. ACHN | 17.2 |
| Renal ca. UO-31 | 26.1 |
| Renal ca. TK-10 | 10.2 |
| Liver | 1.0 |
| Liver (fetal) | 8.0 |
| Liver ca. (hepatoblast) HepG2 | 0.9 |
| Lung | 45.4 |
| Lung (fetal) | 34.9 |
| Lung ca. (small cell) LX-1 | 0.1 |
| Lung ca. (small cell) NCI-H69 | 0.0 |
| Lung ca. (s. cell var.) SHP-77 | 0.0 |
| Lung ca. (large cell)NCI-H460 | 0.2 |
| Lung ca. (non-sm. cell) A549 | 0.2 |
| Lung ca. (non-s. cell) NCI-H23 | 2.8 |
| Lung ca. (non-s. cell) HOP-62 | 1.9 |
| Lung ca. (non-s. cl) NCI-H522 | 12.2 |
| Lung ca. (squam.) SW 900 | 2.7 |
| Lung ca. (squam.) NCI-H596 | 0.0 |
| Mammary gland | 45.4 |
| Breast ca.* (pl. ef) MCF-7 | 0.1 |
| Breast ca.* (pl. ef) MDA-MB-231 | 16.7 |
| Breast ca.* (pl. ef) T47D | 1.3 |
| Breast ca. BT-549 | 11.1 |
| Breast ca. MDA-N | 0.3 |
| Ovary | 16.3 |
| Ovarian ca. OVCAR-3 | 1.6 |
| Ovarian ca. OVCAR-4 | 12.7 |
| Ovarian ca. OVCAR-5 | 1.9 |
| Ovarian ca. OVCAR-8 | 12.6 |
| Ovarian ca. IGROV-1 | 1.8 |
| Ovarian ca.* (ascites) SK-OV-3 | 3.5 |
| Uterus | 11.0 |
| Placenta | 9.0 |
| Prostate | 5.7 |
| Prostate ca.* (bone met)PC-3 | 1.9 |
| Testis | 3.8 |
| Melanoma Hs688(A).T | 100.0 |
| Melanoma* (met) Hs688(B).T | 88.3 |
| Melanoma UACC-62 | 0.2 |
| Melanoma M14 | 0.1 |
| Melanoma LOX IMVI | 3.1 |
| Melanoma* (met) SK-MEL-5 | 0.1 |
| Adipose | 45.4 |

Column A - Rel. Exp. (%) Ag1148, Run 151759893

[0654] TABLE KE
Panel 2D
Column A - Rel. Exp. (%) Ag1148, Run 145375638
Column B - Rel. Exp. (%) Ag1148, Run 147104767

| Tissue Name | A | B |
|---|---|---|
| Normal Colon | 5.0 | 15.7 |
| CC Well to Mod Diff (ODO3866) | 3.9 | 14.6 |
| CC Margin (ODO3866) | 9.0 | 23.7 |
| CC Gr. 2 rectosigmoid (ODO3868) | 0.7 | 1.7 |
| CC Margin (ODO3868) | 3.3 | 5.6 |
| CC Mod Diff (ODO3920) | 0.4 | 1.0 |
| CC Margin (ODO3920) | 3.0 | 5.9 |
| CC Gr. 2 ascend colon (ODO3921) | 67.4 | 14.3 |
| CC Margin (ODO3921) | 3.5 | 11.3 |
| CC from Partial Hepatectomy | 2.3 | 6.0 |
| (ODO4309) Mets | | |
| Liver Margin (ODO4309) | 0.9 | 3.5 |
| Colon mets to lung (OD04451-01) | 4.2 | 3.9 |
| Lung Margin (OD04451-02) | 1.7 | 3.5 |
| Normal Prostate 6546-1 | 4.9 | 5.1 |
| Prostate Cancer (OD04410) | 21.9 | 29.9 |
| Prostate Margin (OD04410) | 39.2 | 30.8 |
| Prostate Cancer (OD04720-01) | 9.7 | 8.6 |
| Prostate Margin (OD04720-02) | 49.3 | 44.4 |
| Normal Lung 061010 | 19.3 | 21.5 |
| Lung Met to Muscle (ODO4286) | 2.8 | 2.6 |
| Muscle Margin (ODO4286) | 12.3 | 8.0 |
| Lung Malignant Cancer (OD03126) | 10.0 | 1.0 |
| Lung Margin (OD03126) | 17.6 | 32.3 |
| Lung Cancer (OD04404) | 4.7 | 11.7 |
| Lung Margin (OD04404) | 3.0 | 7.2 |
| Lung Cancer (OD04565) | 4.0 | 2.8 |
| Lung Margin (OD04565) | 11.8 | 4.7 |
| Lung Cancer (OD04237-01) | 5.1 | 5.1 |
| Lung Margin (OD04237-02) | 7.2 | 21.6 |
| Ocular Mel Met to Liver (ODO4310) | 1.2 | 0.7 |
| Liver Margin (ODO4310) | 6.9 | 5.2 |
| Melanoma Mets to Lung (OD04321) | 3.0 | 2.9 |
| Lung Margin (OD04321) | 33.2 | 37.4 |
| Normal Kidney | 11.2 | 21.5 |
| Kidney Ca, Nuclear grade 2 | 11.8 | 17.2 |
| (OD04338) | | |
| Kidney Margin (OD04338) | 17.8 | 34.6 |
| Kidney Ca Nuclear grade ½ | 2.6 | 5.2 |
| (OD04339) | | |
| Kidney Margin (OD04339) | 15.8 | 15.4 |
| Kidney Ca, Clear cell type (OD04340) | 100.0 | 59.0 |
| Kidney Margin (OD04340) | 36.1 | 57.0 |
| Kidney Ca, Nuclear grade 3 | 2.6 | 2.0 |
| (OD04348) | | |
| Kidney Margin (OD04348) | 25.3 | 14.5 |
| Kidney Cancer (OD04622-01) | 32.8 | 15.5 |
| Kidney Margin (OD04622-03) | 6.2 | 3.7 |
| Kidney Cancer (OD04450-01) | 12.5 | 9.1 |
| Kidney Margin (OD04450-03) | 19.5 | 14.8 |
| Kidney Cancer 8120607 | 3.8 | 2.9 |
| Kidney Margin 8120608 | 6.3 | 6.6 |
| Kidney Cancer 8120613 | 0.6 | 0.7 |
| Kidney Margin 8120614 | 1.1 | 4.0 |
| Kidney Cancer 9010320 | 4.3 | 14.6 |
| Kidney Margin 9010321 | 4.7 | 6.7 |
| Normal Uterus | 33.2 | 25.5 |
| Uterus Cancer 064011 | 72.7 | 44.1 |
| Normal Thyroid | 8.6 | 11.2 |
| Thyroid Cancer 064010 | 8.4 | 5.0 |
| Thyroid Cancer A302152 | 5.5 | 4.9 |
| Thyroid Margin A302153 | 40.1 | 35.4 |
| Normal Breast | 25.3 | 23.2 |
| Breast Cancer (OD04566) | 4.2 | 2.5 |
| Breast Cancer (OD04590-01) | 1.5 | 3.8 |
| Breast Cancer Mets | 16.4 | 9.7 |
| (OD04590-03) | | |
| Breast Cancer Metastasis | 3.1 | 2.3 |
| (OD04655-05) | | |
| Breast Cancer 064006 | 5.0 | 5.3 |
| Breast Cancer 1024 | 1.6 | 5.1 |
| Breast Cancer 9100266 | 5.2 | 3.9 |
| Breast Margin 9100265 | 6.7 | 5.1 |
| Breast Cancer A209073 | 8.8 | 5.6 |
| Breast Margin A209073 | 1.0 | 1.8 |
| Normal Liver | 0.6 | 0.6 |
| Liver Cancer 064003 | 0.2 | 0.8 |
| Liver Cancer 1025 | 1.6 | 4.7 |
| Liver Cancer 1026 | 1.4 | 3.6 |
| Liver Cancer 6004-T | 2.2 | 4.1 |
| Liver Tissue 6004-N | 0.3 | 2.1 |
| Liver Cancer 6005-T | 2.0 | 4.4 |
| Liver Tissue 6005-N | 0.8 | 1.8 |
| Normal Bladder | 6.2 | 8.9 |
| Bladder Cancer 1023 | 3.8 | 4.6 |
| Bladder Cancer A302173 | 0.8 | 2.4 |
| Bladder Cancer (OD04718-01) | 6.2 | 9.7 |
| Bladder Normal Adjacent | 50.0 | 100.0 |
| (OD04718-03) | | |
| Normal Ovary | 1.6 | 7.5 |
| Ovarian Cancer 064008 | 26.1 | 69.3 |
| Ovarian Cancer (OD04768-07) | 7.7 | 18.0 |
| Ovary Margin (OD04768-08) | 75.8 | 62.0 |
| Normal Stomach | 2.6 | 8.0 |
| Gastric Cancer 9060358 | 0.5 | 1.5 |
| Stomach Margin 9060359 | 2.5 | 7.0 |
| Gastric Cancer 9060395 | 1.5 | 6.0 |
| Stomach Margin 9060394 | 2.1 | 8.7 |
| Gastric Cancer 9060397 | 4.4 | 16.7 |
| Stomach Margin 9060396 | 0.6 | 1.9 |
| Gastric Cancer 064005 | 2.0 | 7.0 |

[0655] TABLE KF
Panel 3D

| Tissue Name | A |
|---|---|
| Daoy- Medulloblastoma | 15.3 |
| TE671- Medulloblastoma | 0.0 |
| D283 Med- Medulloblastoma | 1.5 |
| PFSK-1- Primitive Neuroectodermal | 3.4 |
| XF-498- CNS | 22.1 |
| SNB-78- Glioma | 25.2 |
| SF-268- Glioblastoma | 60.3 |
| T98G- Glioblastoma | 19.2 |
| SK-N-SH- Neuroblastoma (metastasis) | 13.0 |
| SF-295- Glioblastoma | 3.5 |
| Cerebellum | 0.3 |
| Cerebellum | 0.1 |
| NCI-H292- Mucoepidermoid lung carcinoma | 100.0 |
| DMS-114- Small cell lung cancer | 2.7 |
| DMS-79- Small cell lung cancer | 0.2 |
| NCI-H146- Small cell lung cancer | 0.0 |
| NCI-H526- Small cell lung cancer | 0.0 |
| NCI-N417- Small cell lung cancer | 0.0 |
| NCI-H82- Small cell lung cancer | 0.1 |
| NCI-H157- Squamous cell lung cancer (metastasis) | 42.0 |
| NCI-H1155- Large cell lung cancer | 0.5 |
| NCI-H1299- Large cell lung cancer | 23.5 |
| NCI-H727- Lung carcinoid | 0.3 |
| NCI-UMC-11- Lung carcinoid | 0.1 |
| LX-1- Small cell lung cancer | 0.0 |
| Colo-205- Colon cancer | 0.0 |
| KM12- Colon cancer | 0.9 |
| KM20L2- Colon cancer | 0.2 |
| NCI-H716- Colon cancer | 1.0 |
| SW-48- Colon adenocarcinoma | 0.0 |
| SW1116- Colon adenocarcinoma | 0.5 |
| LS 174T- Colon adenocarcinoma | 0.8 |
| SW-948- Colon adenocarcinoma | 0.0 |
| SW-480- Colon adenocarcinoma | 0.0 |
| NCI-SNU-5- Gastric carcinoma | 3.5 |
| KATO III- Gastric carcinoma | 0.7 |
| NCI-SNU-16- Gastric carcinoma | 6.3 |
| NCI-SNU-1- Gastric carcinoma | 0.4 |
| KF-1- Gastric adenocarcinoma | 0.0 |
| RF-48- Gastric adenocarcinoma | 0.0 |
| MKN-45- Gastric carcinoma | 1.6 |
| NCI-N87- Gastric carcinoma | 1.0 |
| OVCAR-5- Ovarian carcinoma | 0.9 |
| RL95-2- Uterine carcinoma | 1.4 |
| HelaS3- Cervical adenocarcinoma | 1.6 |
| Ca Ski- Cervical epidermoid carcinoma (metastasis) | 52.9 |
| ES-2- Ovarian clear cell carcinoma | 26.8 |
| Ramos- Stimulated with PMA/ionomycin 6 h | 0.0 |
| Ramos- Stimulated with PMA/ionomycin 14 h | 0.1 |
| MEG-01- Chronic myelogenous leukemia (megokaryoblast) | 0.9 |
| Raji- Burkitt's lymphoma | 0.1 |
| Daudi- Burkitt's lymphoma | 0.2 |
| U266- B-cell plasmacytoma | 0.0 |
| CA46- Burkitt's lymphoma | 0.0 |
| RL- non-Hodgkin's B-cell lymphoma | 0.0 |
| JM1- pre-B-cell lymphoma | 0.0 |
| Jurkat- T cell leukemia | 0.0 |
| TF-1- Erythroleukemia | 0.3 |
| HUT 78- T-cell lymphoma | 0.0 |
| U937- Histiocytic lymphoma | 0.0 |
| KU-812- Myelogenous leukemia | 0.2 |
| 769-P- Clear cell renal carcinoma | 17.7 |
| Caki-2- Clear cell renal carcinoma | 1.7 |
| SW 839- Clear cell renal carcinoma | 71.7 |
| Rhabdoid kidney tumor | 3.0 |
| Hs766T- Pancreatic carcinoma (LN metastasis) | 15.4 |
| CAPAN-1- Pancreatic adenocarcinoma (liver metastasis) | 6.9 |
| SU86.86- Pancreatic carcinoma (liver metastasis) | 14.6 |
| BxPC-3- Pancreatic adenocarcinoma | 3.6 |
| HPAC- Pancreatic adenocarcinoma | 4.0 |
| MIA PaCa-2- Pancreatic carcinoma | 3.4 |
| CFPAC-1- Pancreatic ductal adenocarcinoma | 28.3 |
| PANC-1- Pancreatic epithelioid ductal carcinoma | 16.2 |
| T24- Bladder carcinma (transitional cell) | 12.1 |
| 5637- Bladder carcinoma | 3.1 |
| HT-1197- Bladder carcinoma | 14.6 |
| UM-UC-3- Bladder carcinma (transitional cell) | 4.6 |
| A204- Rhabdomyosarcoma | 0.7 |
| HT-1080- Fibrosarcoma | 15.8 |
| MG-63- Osteosarcoma | 53.2 |
| SK-LMS-1- Leiomyosarcoma (vulva) | 55.5 |
| SJRH30- Rhabdomyosarcoma (met to bone marrow) | 1.7 |
| A431- Epidermoid carcinoma | 1.6 |
| WM266-4- Melanoma | 0.5 |
| DU 145- Prostate carcinoma (brain metastasis) | 1.8 |
| MDA-MB-468- Breast adenocarcinoma | 1.8 |
| SCC-4- Squamous cell carcinoma of tongue | 1.3 |
| SCC-9- Squamous cell carcinoma of tongue | 1.0 |
| SCC-15- Squamous cell carcinoma of tongue | 1.3 |
| CAL 27- Squamous cell carcinoma of tongue | 20.7 |

Column A - Rel. Exp. (%) Ag1148, Run 163476715

[0656] TABLE KG
Panel 4D

| Tissue Name | A |
|---|---|
| Secondary Th1 act | 0.0 |
| Secondary Th2 act | 0.0 |
| Secondary Tr1 act | 0.0 |
| Secondary Th1 rest | 0.0 |
| Secondary Th2 rest | 0.0 |
| Secondary Tr1 rest | 0.0 |
| Primary Th1 act | 0.1 |
| Primary Th2 act | 0.3 |
| Primary Tr1 act | 0.5 |
| Primary Th1 rest | 0.5 |
| Primary Th2 rest | 0.4 |
| Primary Tr1 rest | 0.1 |
| CD45RA CD4 lymphocyte act | 39.0 |
| CD45RO CD4 lymphocyte act | 0.1 |
| CD8 lymphocyte act | 0.1 |
| Secondary CD8 lymphocyte rest | 0.0 |
| Secondary CD8 lymphocyte act | 0.0 |
| CD4 lymphocyte none | 0.0 |
| 2ry Th1/Th2/Tr1_anti-CD95 CH11 | 0.3 |
| LAK cells rest | 0.0 |
| LAK cells IL-2 | 0.1 |
| LAK cells IL-2 + IL-12 | 0.3 |
| LAK cells IL-2 + IFN gamma | 0.4 |
| LAK cells IL-2 + IL-18 | 0.0 |
| LAK cells PMA/ionomycin | 0.3 |
| NK Cells IL-2 rest | 0.0 |
| Two Way MLR 3 day | 0.1 |
| Two Way MLR 5 day | 0.2 |
| Two Way MLR 7 day | 0.0 |
| PBMC rest | 0.0 |
| PBMC PWM | 0.4 |
| PBMC PHA-L | 0.3 |
| Ramos (B cell) none | 0.7 |
| Ramos (B cell) ionomycin | 1.4 |
| B lymphocytes PWM | 1.0 |
| B lymphocytes CD40L and IL-4 | 0.6 |
| EOL-1 dbcAMP | 0.3 |
| EOL-1 dbcAMP PMA/ionomycin | 0.4 |
| Dendritic cells none | 0.0 |
| Dendritic cells LPS | 0.0 |
| Dendritic cells anti-CD40 | 0.1 |
| Monocytes rest | 0.1 |
| Monocytes LPS | 0.1 |
| Macrophages rest | 0.2 |
| Macrophages LPS | 0.0 |
| HUVEC none | 49.3 |
| HUVEC starved | 41.2 |
| HUVEC IL-1beta | 17.7 |
| HUVEC IFN gamma | 40.3 |
| HUVEC TNF alpha + IFN gamma | 30.1 |
| HUVEC TNF alpha + IL4 | 42.6 |
| HUVEC IL-11 | 19.8 |
| Lung Microvascular EC none | 63.7 |
| Lung Microvascular EC TNFalpha + IL-1beta | 46.7 |
| Microvascular Dermal EC none | 93.3 |
| Microsvasular Dermal EC TNFalpha + IL-1beta | 71.7 |
| Bronchial epithelium TNFalpha + IL1beta | 16.7 |
| Small airway epithelium none | 5.3 |
| Small airway epithelium TNFalpha + IL-1beta | 29.5 |
| Coronery artery SMC rest | 46.0 |
| Coronery artery SMC TNFalpha + IL-1beta | 48.0 |
| Astrocytes rest | 13.0 |
| Astrocytes TNFalpha + IL-1beta | 28.7 |
| KU-812 (Basophil) rest | 0.2 |
| KU-812 (Basophil) PMA/ionomycin | 0.7 |
| CCD1106 (Keratinocytes) none | 4.5 |
| CCD1106 (Keratinocytes) TNFalpha + IL-1beta | 12.7 |
| Liver cirrhosis | 7.1 |
| Lupus kidney | 2.5 |
| NCI-H292 none | 23.7 |
| NCI-H292 IL-4 | 12.3 |
| NCI-H292 IL-9 | 11.7 |
| NCI-H292 IL-13 | 12.2 |
| NCI-H292 IFN gamma | 13.5 |
| HPAEC none | 42.3 |
| HPAEC TNF alpha + IL-1 beta | 51.8 |
| Lung fibroblast none | 24.8 |
| Lung fibroblast TNF alpha + IL-1 beta | 6.7 |
| Lung fibroblast IL-4 | 41.8 |
| Lung fibroblast IL-9 | 32.8 |
| Lung fibroblast IL-13 | 89.5 |
| Lung fibroblast IFN gamma | 69.3 |
| Dermal fibroblast CCD1070 rest | 100.0 |
| Dermal fibroblast CCD1070 TNF alpha | 77.9 |
| Dermal fibroblast CCD1070 IL-1 beta | 95.3 |
| Dermal fibroblast IFN gamma | 5.8 |
| Dermal fibroblast IL-4 | 8.0 |
| IBD Colitis 2 | 3.0 |
| IBD Crohn's | 5.3 |
| Colon | 2.5 |
| Lung | 11.4 |
| Thymus | 9.1 |
| Kidney | 2.6 |

Column A - Rel. Exp. (%) Ag1148, Run 145386435

HASS Panel v1.0 Summary: Ag1148 Expression of the CG55688-01 gene was highest in T24 cells (CT=27.9). This gene was also expressed at significant level in CaPaN and U87 cancer cell lines, as well as in primary astrocytes, renal epithelial cells and melanocytes in culture. Gene expression was induced by a combination of low oxygen tension and acidic pH in U8 cell lines, suggesting a regulation in vivo may also occur in regions of low pH and low oxygen. Therapeutic modulation of the activity of this gene or its protein product is useful in the treatment of cancer.
PGI1.0 Summary: Ag1148 Highest expression of this gene was detected in emphysema lung (CT=25.2). High expression of this gene was also detected in lung fibrosis, asthma, emphysema and ulcerative colitis samples. Therapeutic modulation of the activity of this gene or its protein product using nucleic acid, protein, antibody or small molecule drugs is useful in the treatment of lung fibrosis, asthma, emphysema and ulcerative colitis.
Panel 1.3D Summary: Ag1148 The expression of this gene was highest in a sample derived from a melanoma cell line (Hs.688(A).T) (CT=27). In addition, there is significant expression in a related melanoma cell line (Hs.688(B).T) as well as a cluster of brain cancer cell lines and renal cancer cell lines. T Therapeutic modulation of the activity of this gene or its protein product is useful in the treatment of melanoma, renal cancer or brain cancer.

[0660] This panel shows significant expression of this gene in metabolic tissues, including adipose, pancreas, adrenal, thyroid, pituitary, skeletal muscle and adult and fetal liver. The CG55688-01 gene encodes CYR61, which belongs to the insulin-like growth factor binding protein family and may play myriad roles in metabolic regulation. Therapeutic modulation of the activity of this gene or its protein product using nucleic acid, protein, antibody or small molecule drugs is useful for the treatment of metabolic and endocrine diseases, including obesity and Types 1 and 2 diabetes.

[0661] In addition, this gene was expressed at low levels in several brain regions including hippocampus, cortex, substantia nigra, thalamus, amygdala, and the fetal brain. Cry61 is an immediate early gene that has been implicated in memory formation and synaptic plasticity (Albrecht C, von Der Kammer H, Mayhaus M, Klaudiny J, Schweizer M, Nitsch R M. Muscarinic acetylcholine receptors induce the expression of the immediate early growth regulatory gene CYR61. J Biol Chem Sep. 15, 2000;275(37):28929-36). It has also been shown to be upregulated during the development of the hippocampus, which is a critical brain region for the formation of long-term memory (Chung K C, Ahn Y S. Expression of immediate early gene cyr61 during the differentiation of immortalized embryonic hippocampal neuronal cells. Neurosci Lett Oct. 23, 1998;255(3): 155-8). Therefore, this gene, expressed protein, antibodies or small molecule drug targeting this gene or gene product is useful in the treatment of dementia (Alzheimer's, vascular, etc) or for memory enhancement.

[0662] Panel 2D Summary: Ag1148 Highest expression of this gene was found in normal bladder tissue and a kidney cancer sample (CTs=28). In addition, there was significant expression of this gene associated with ovarian and prostate derived tissues and a number of kidney samples. Therapeutic modulation of the activity of this gene or its protein product is useful in the treatment of kidney cancer, ovarian cancer or prostate cancer.

[0663] Panel 3D Summary: Ag1148 Highest expression of this gene was detected in lung cancer cell line NCI-H292 (CT=28). Significant expression of this gene was also seen in a number of cancer cell lines derived from brain, renal, pancreatic, bladder cancers and sarcomas. Therapeutic modulation of the activity of this gene or its protein product is useful in the treatment of these cancers.

[0664] Panel 4D Summary: Ag1148 This gene, a Cyr61 homolog, was expressed at moderate levels (CTs=28-32) in resting and cytokine-stimulated HUVEC, lung microvascular endothelial cells, coronary artery smooth muscle cells, bronchial epithelial cells, small airway epithelial cells, astrocytes, pulmonary artery endothelial cells, lung fibroblasts, and dermal fibroblasts. Based upon this expression pattern and a role for Cyr61 in vascular biology (Babic A M, Kireeva M L, Kolesnikova T V, Lau L F CYR61, a product of a growth factor-inducible immediate early gene, promotes angiogenesis and tumor growth. Proc Natl Acad Sci USA May 26, 1998;95(11):6355-60), therapeutic modulation of the acitivity of this gene or its protein product is useful in the treatment of inflammatory or autoimmune diseases, including Crohn's disease, ulcerative colitis, multiple sclerosis, chronic obstructive pulmonary disease, asthma, emphysema, rheumatoid arthritis, or psoriasis.

[0665] L. CG56768-01: Wnt-5A

[0666] Expression of gene CG56768-01 was assessed using the primer-probe set Ag1450, described in Table LA. Results of the RTQ-PCR runs are shown in Tables LB, LC, LD and LE.

TABLE LA
Probe Name Ag1450

| | | | Start | SEQ ID |
|---|---|---|---|---|
| Primers | Sequences | Length | Position | No |
| Forward | 5′-ccaagttcttcctagtgg | 22 | 82 | 322 |
| | cttt-3′ | | | |
| Probe | TET-5′-tttctccttcgccc | 26 | 113 | 323 |
| | aggttgtaattg-3′-TAMRA | | | |
| Reverse | 5′-atacctagcgaccaccaa | 22 | 145 | 324 |
| | gaat-3′ | | | |

[0667] TABLE LB
Ardais Panel 1.1

| Tissue Name | A |
|---|---|
| Lung adenocarcinoma SI A | 9.0 |
| Lung adenocarcinoma SI B | 3.0 |
| Lung adenocarcinoma SI B NAT | 2.5 |
| Lung adenocarcinoma SI C | 0.6 |
| Lung adenocarcinoma SI C NAT | 2.3 |
| Lung adenocarcinoma SII A | 1.1 |
| Lung adenocarcinoma SII A NAT | 2.2 |
| Lung adenocarcinoma SII C NAT | 5.9 |
| Lung adenocarcinoma SIII A | 5.5 |
| Lung adenocarcinoma SIII B | 2.8 |
| Lung adenocarcinoma SIII C | 7.7 |
| Lung SCC SI A | 1.8 |
| Lung SCC SI B NAT | 3.2 |
| Lung SCC SI C | 1.1 |
| Lung SCC SI C NAT | 11.8 |
| Lung SCC SI D | 100.0 |
| Lung SCC SI D NAT | 0.5 |
| Lung SCC SII A | 3.8 |
| Lung SCC SII B | 1.3 |
| Lung SCC SIII A | 3.0 |
| Lung SCC SIII A NAT | 1.3 |

Column A Rel. Exp. (%) Agl450, Run 306913817

[0668] TABLE LC
Panel 1.2
Column A - Rel. Exp. (%) Ag1450, Run 140179432
Column B - Rel. Exp. (%) Ag1450, Run 140448122

| Tissue Name | A | B |
|---|---|---|
| Endothelial cells | 0.5 | 0.5 |
| Heart (Fetal) | 1.5 | 2.1 |
| Pancreas | 0.2 | 0.6 |
| Pancreatic ca. CAPAN 2 | 0.0 | 0.0 |
| Adrenal Gland | 0.9 | 1.2 |
| Thyroid | 0.3 | 0.3 |
| Salivary gland | 21.6 | 20.0 |
| Pituitary gland | 2.3 | 0.2 |
| Brain (fetal) | 0.2 | 0.1 |
| Brain (whole) | 0.1 | 0.1 |
| Brain (amygdala) | 0.4 | 0.5 |
| Brain (cerebellum) | 0.6 | 0.4 |
| Brain (hippocampus) | 1.2 | 1.4 |
| Brain (thalamus) | 0.6 | 0.6 |
| Cerebral Cortex | 3.3 | 4.6 |
| Spinal cord | 0.2 | 0.1 |
| glio/astro U87-MG | 51.8 | 64.6 |
| glio/astro U-118-MG | 46.3 | 55.5 |
| astrocytoma SW1783 | 13.4 | 14.1 |
| neuro*; met SK-N-AS | 2.1 | 2.0 |
| astrocytoma SF-539 | 3.1 | 2.5 |
| astrocytoma SNB-75 | 12.0 | 10.2 |
| glioma SNB-19 | 0.4 | 1.1 |
| glioma U251 | 2.9 | 4.0 |
| glioma SF-295 | 100.0 | 100.0 |
| Heart | 4.1 | 5.6 |
| Skeletal Muscle | 5.6 | 7.7 |
| Bone marrow | 0.1 | 0.1 |
| Thymus | 0.2 | 0.1 |
| Spleen | 0.4 | 0.6 |
| Lymph node | 0.1 | 0.1 |
| Colorectal Tissue | 0.8 | 1.7 |
| Stomach | 0.2 | 0.6 |
| Small intestine | 3.4 | 3.4 |
| Colon ca. SW480 | 10.2 | 18.3 |
| Colon ca.* SW620 (SW480 met) | 0.0 | 0.0 |
| Colon ca. HT29 | 0.0 | 0.0 |
| Colon ca. HCT-116 | 0.0 | 0.0 |
| Colon ca. CaCo-2 | 1.1 | 1.2 |
| Colon ca. Tissue (ODO3866) | 1.2 | 1.3 |
| Colon ca. HCC-2998 | 0.8 | 0.9 |
| Gastric ca.* (liver met) NCI-N87 | 0.0 | 0.1 |
| Bladder | 4.6 | 8.1 |
| Trachea | 0.9 | 0.1 |
| Kidney | 5.8 | 5.6 |
| Kidney (fetal) | 5.1 | 4.6 |
| Renal ca. 786-0 | 1.2 | 1.5 |
| Renal ca. A498 | 0.5 | 0.9 |
| Renal ca. RXF 393 | 0.8 | 1.4 |
| Renal ca. ACHN | 0.9 | 1.2 |
| Renal ca. UO-31 | 6.6 | 10.4 |
| Renal ca. TK-10 | 0.2 | 0.2 |
| Liver | 0.7 | 0.9 |
| Liver (fetal) | 0.3 | 0.4 |
| Liver ca. (hepatoblast) HepG2 | 0.0 | 0.0 |
| Lung | 0.1 | 0.5 |
| Lung (fetal) | 0.2 | 0.3 |
| Lung ca. (small cell) LX-1 | 0.0 | 0.0 |
| Lung ca. (small cell) NCI-H69 | 0.2 | 0.3 |
| Lung ca. (s. cell var.) SHP-77 | 0.1 | 0.1 |
| Lung ca. (large cell)NCI-H460 | 20.0 | 27.7 |
| Lung ca. (non-sm. cell) A549 | 0.1 | 0.1 |
| Lung ca. (non-s. cell) NCI-H23 | 0.2 | 0.3 |
| Lung ca. (non-s. cell) HOP-62 | 70.7 | 58.2 |
| Lung ca. (non-s. cl) NCI-H522 | 1.7 | 2.4 |
| Lung ca. (squam.) SW 900 | 12.8 | 22.5 |
| Lung ca. (squam.) NCI-H596 | 0.6 | 1.0 |
| Mammary gland | 1.1 | 1.3 |
| Breast ca.* (pl. ef) MCF-7 | 0.2 | 0.2 |
| Breast ca.* (pl. ef) MDA-MB-231 | 0.0 | 0.0 |
| Breast ca.* (pl. ef) T47D | 0.0 | 0.0 |
| Breast ca. BT-549 | 1.3 | 1.3 |
| Breast ca. MDA-N | 0.0 | 0.0 |
| Ovary | 10.7 | 19.3 |
| Ovarian ca. OVCAR-3 | 18.0 | 16.3 |
| Ovarian ca. OVCAR-4 | 14.5 | 16.5 |
| Ovarian ca. OVCAR-5 | 1.4 | 1.5 |
| Ovarian ca. OVCAR-8 | 2.5 | 2.6 |
| Ovarian ca. IGROV-1 | 15.6 | 9.4 |
| Ovarian ca. (ascites) SK-OV-3 | 1.3 | 2.4 |
| Uterus | 3.5 | 2.5 |
| Placenta | 8.7 | 1.2 |
| Prostate | 2.0 | 2.9 |
| Prostate ca.* (bone met) PC-3 | 17.2 | 17.4 |
| Testis | 0.2 | 0.4 |
| Melanoma Hs688(A).T | 17.2 | 22.2 |
| Melanoma* (met) Hs688(B).T | 16.2 | 18.7 |
| Melanoma UACC-62 | 2.2 | 2.7 |
| Melanoma M14 | 0.8 | 1.0 |
| Melanoma LOX IMVI | 4.7 | 5.6 |
| Melanoma* (met) SK-MEL-5 | 0.5 | 0.8 |

[0669] TABLE LD
Panel 2D
Colmn A - Rel. Exp. (%) Ag1450, Run 145090529
Column B - Rel. Exp. (%) Ag1450, Run 148500417

| Tissue Name | A | B |
|---|---|---|
| Normal Colon | 13.7 | 10.8 |
| CC Well to Mod Diff (ODO3866) | 20.7 | 15.8 |
| CC Margin (ODO3866) | 9.8 | 5.1 |
| CC Gr. 2 rectosigmoid (ODO3868) | 14.2 | 8.4 |
| CC Margin (ODO3868) | 3.6 | 1.6 |
| CC Mod Diff (ODO3920) | 12.2 | 10.7 |
| CC Margin (ODO3920) | 1.9 | 2.2 |
| CC Gr. 2 ascend colon (ODO3921) | 29.9 | 33.7 |
| CC Margin (ODO3921) | 9.1 | 6.7 |
| CC from Partial Hepatectomy | 5.3 | 4.9 |
| (ODO4309) Mets | | |
| Liver Margin (ODO4309) | 4.5 | 4.7 |
| Colon mets to lung (OD04451-01) | 9.3 | 4.4 |
| Lung Margin (OD04451-02) | 12.3 | 5.9 |
| Normal Prostate 6546-1 | 15.4 | 5.7 |
| Prostate Cancer (OD04410) | 21.0 | 8.7 |
| Prostate Margin (OD04410) | 42.6 | 33.4 |
| Prostate Cancer (OD04720-01) | 23.5 | 22.2 |
| Prostate Margin (OD04720-02) | 32.1 | 25.2 |
| Normal Lung 061010 | 15.7 | 12.0 |
| Lung Met to Muscle (ODO4286) | 1.1 | 0.8 |
| Muscle Margin (ODO4286) | 1.6 | 0.3 |
| Lung Malignant Cancer (OD03126) | 40.9 | 20.7 |
| Lung Margin (OD03126) | 20.3 | 15.9 |
| Lung Cancer (OD04404) | 100.0 | 100.0 |
| Lung Margin (OD04404) | 27.2 | 25.9 |
| Lung Cancer (OD04565) | 31.4 | 29.3 |
| Lung Margin (OD04565) | 6.8 | 5.1 |
| Lung Cancer (OD04237-01) | 7.1 | 4.3 |
| Lung Margin (OD04237-02) | 11.3 | 7.0 |
| Ocular Mel Met to Liver (ODO4310) | 0.0 | 0.0 |
| Liver Margin (ODO4310) | 4.1 | 1.5 |
| Melanoma Mets to Lung (OD04321) | 7.6 | 4.8 |
| Lung Margin (OD04321) | 33.9 | 20.4 |
| Normal Kidney | 19.9 | 9.2 |
| Kidney Ca, Nuclear grade 2 | 32.5 | 25.3 |
| (OD04338) | | |
| Kidney Margin (OD04338) | 9.8 | 7.9 |
| Kidney Ca Nuclear grade ½ | 29.5 | 23.7 |
| (OD04339) | | |
| Kidney Margin (OD04339) | 3.6 | 2.3 |
| Kidney Ca, Clear cell type (OD04340) | 4.0 | 3.7 |
| Kidney Margin (OD04340) | 14.8 | 9.3 |
| Kidney Ca, Nuclear grade 3 | 4.5 | 3.0 |
| (OD04348) | | |
| Kidney Margin (OD04348) | 8.0 | 4.5 |
| Kidney Cancer (OD04622-01) | 4.5 | 4.1 |
| Kidney Margin (OD04622-03) | 11.8 | 4.2 |
| Kidney Cancer (OD04450-01) | 26.4 | 12.9 |
| Kidney Margin (OD04450-03) | 13.7 | 5.0 |
| Kidney Cancer 8120607 | 1.7 | 1.0 |
| Kidney Margin 8120608 | 3.8 | 1.5 |
| Kidney Cancer 8120613 | 0.4 | 0.4 |
| Kidney Margin 8120614 | 8.0 | 5.2 |
| Kidney Cancer 9010320 | 10.7 | 7.0 |
| Kidney Margin 9010321 | 11.6 | 5.4 |
| Normal Uterus | 11.2 | 5.9 |
| Uterus Cancer 064011 | 59.9 | 37.4 |
| Normal Thyroid | 16.3 | 5.7 |
| Thyroid Cancer 064010 | 33.0 | 17.0 |
| Thyroid Cancer A302152 | 14.4 | 9.2 |
| Thyroid Margin A302153 | 11.9 | 7.9 |
| Normal Breast | 20.3 | 10.8 |
| Breast Cancer (OD04566) | 10.7 | 5.8 |
| Breast Cancer (OD04590-01) | 10.4 | 7.1 |
| Breast Cancer Mets | 7.6 | 3.0 |
| (OD04590-03) | | |
| Breast Cancer Metastasis | 7.4 | 5.4 |
| (OD04655-05) | | |
| Breast Cancer 064006 | 13.9 | 9.4 |
| Breast Cancer 1024 | 40.9 | 25.9 |
| Breast Cancer 9100266 | 9.8 | 5.4 |
| Breast Margin 9100265 | 13.8 | 10.7 |
| Breast Cancer A209073 | 45.7 | 33.0 |
| Breast Margin A209073 | 11.0 | 5.6 |
| Normal Liver | 4.2 | 2.6 |
| Liver Cancer 064003 | 0.6 | 0.3 |
| Liver Cancer 1025 | 2.9 | 2.5 |
| Liver Cancer 1026 | 7.3 | 6.3 |
| Liver Cancer 6004-T | 7.0 | 2.2 |
| Liver Tissue 6004-N | 0.7 | 0.7 |
| Liver Cancer 6005-T | 11.8 | 5.7 |
| Liver Tissue 6005-N | 0.6 | 0.7 |
| Normal Bladder | 12.1 | 11.7 |
| Bladder Cancer 1023 | 4.9 | 2.9 |
| Bladder Cancer A302173 | 59.5 | 27.4 |
| Bladder Cancer (OD04718-01) | 12.8 | 11.7 |
| Bladder Normal Adjacent | 2.8 | 0.7 |
| (OD04718-03) | | |
| Normal Ovary | 29.7 | 19.8 |
| Ovarian Cancer 064008 | 25.2 | 30.8 |
| Ovarian Cancer (OD04768-07) | 2.8 | 2.5 |
| Ovary Margin (OD04768-08) | 4.0 | 2.6 |
| Normal Stomach | 6.7 | 5.4 |
| Gastric Cancer 9060358 | 4.9 | 1.6 |
| Stomach Margin 9060359 | 7.1 | 5.0 |
| Gastric Cancer 9060395 | 30.1 | 25.5 |
| Stomach Margin 9060394 | 1.5 | 5.6 |
| Gastric Cancer 9060397 | 18.3 | 21.9 |
| Stomach Margin 9060396 | 3.7 | 1.8 |
| Gastric Cancer 064005 | 16.3 | 18.0 |

[0670] TABLE LE
Panel 4.1D

| Tissue Name | A |
|---|---|
| Secondary Th1 act | 0.3 |
| Secondary Th2 act | 0.3 |
| Secondary Tr1 act | 0.3 |
| Secondary Th1 rest | 0.3 |
| Secondary Th2 rest | 0.0 |
| Secondary Tr1 rest | 0.1 |
| Primary Th1 act | 0.0 |
| Primary Th2 act | 0.0 |
| Primary Tr1 act | 0.0 |
| Primary Th1 rest | 0.0 |
| Primary Th2 rest | 0.0 |
| Primary Tr1 rest | 0.0 |
| CD45RA CD4 lymphocyte act | 44.4 |
| CD45RO CD4 lymphocyte act | 0.0 |
| CD8 lymphocyte act | 0.0 |
| Secondary CD8 lymphocyte rest | 0.1 |
| Secondary CD8 lymphocyte act | 0.0 |
| CD4 lymphocyte none | 0.0 |
| 2ry Th1/Th2/Tr1_anti-CD95 CH11 | 0.0 |
| LAK cells rest | 0.2 |
| LAK cells IL-2 | 0.0 |
| LAK cells IL-2 + IL-12 | 0.1 |
| LAK cells IL-2 + IFN gamma | 0.0 |
| LAK cells IL-2 + IL-18 | 0.1 |
| LAK cells PMA/ionomycin | 0.1 |
| NK Cells IL-2 rest | 0.1 |
| Two Way MLR 3 day | 0.2 |
| Two Way MLR 5 day | 1.2 |
| Two Way MLR 7 day | 0.1 |
| PBMC rest | 0.0 |
| PBMC PWM | 2.9 |
| PBMC PHA-L | 1.5 |
| Ramos (B cell) none | 0.0 |
| Ramos (B cell) ionomycin | 0.0 |
| B lymphocytes PWM | 0.1 |
| B lymphocytes CD40L and IL-4 | 0.4 |
| EOL-1 dbcAMP | 0.0 |
| EOL-1 dbcAMP PMA/ionomycin | 0.0 |
| Dendritic cells none | 2.5 |
| Dendritic cells LPS | 20.6 |
| Dendritic cells anti-CD40 | 10.7 |
| Monocytes rest | 0.0 |
| Monocytes LPS | 20.4 |
| Macrophages rest | 0.2 |
| Macrophages LPS | 5.9 |
| HUVEC none | 0.0 |
| HUVEC starved | 0.0 |
| HUVEC IL-1beta | 0.1 |
| HUVEC IFN gamma | 0.2 |
| HUVEC TNF alpha + IFN gamma | 0.7 |
| HUVEC TNF alpha + IL4 | 0.5 |
| HUVEC IL-11 | 0.4 |
| Lung Microvascular EC none | 0.2 |
| Lung Microvascular EC TNFalpha + IL-1beta | 0.4 |
| Microvascular Dermal EC none | 0.0 |
| Microsvasular Dermal EC TNFalpha + IL-1beta | 0.1 |
| Bronchial epithelium TNFalpha + IL1beta | 3.7 |
| Small airway epithelium none | 5.0 |
| Small airway epithelium TNFalpha + IL-1beta | 0.4 |
| Coronery artery SMC rest | 2.4 |
| Coronery artery SMC TNFalpha + IL-1beta | 3.3 |
| Astrocytes rest | 2.8 |
| Astrocytes TNFalpha + IL-1beta | 10.8 |
| KU-812 (Basophil) rest | 0.3 |
| KU-812 (Basophil) PMA/ionomycin | 0.5 |
| CCD1106 (Keratinocytes) none | 3.0 |
| CCD1106 (Keratinocytes) TNFalpha + IL-1beta | 1.3 |
| Liver cirrhosis | 0.4 |
| NCI-H292 none | 0.0 |
| NCI-H292 IL-4 | 0.1 |
| NCI-H292 IL-9 | 0.3 |
| NCI-H292 IL-13 | 2.3 |
| NCI-H292 IFN gamma | 0.2 |
| HPAEC none | 0.0 |
| HPAEC TNF alpha + IL-1 beta | 0.5 |
| Lung fibroblast none | 38.2 |
| Lung fibroblast TNF alpha + IL-1 beta | 75.3 |
| Lung fibroblast IL-4 | 39.0 |
| Lung fibroblast IL-9 | 71.7 |
| Lung fibroblast IL-13 | 25.0 |
| Lung fibroblast IFN gamma | 41.2 |
| Dermal fibroblast CCD1070 rest | 84.1 |
| Dermal fibroblast CCD1070 TNF alpha | 76.8 |
| Dermal fibroblast CCD1070 IL-1 beta | 100.0 |
| Dermal fibroblast IFN gamma | 8.9 |
| Dermal fibroblast IL-4 | 10.6 |
| Dermal Fibroblasts rest | 6.1 |
| Neutrophils TNFa + LPS | 1.1 |
| Neutrophils rest | 1.5 |
| Colon | 0.9 |
| Lung | 3.6 |
| Thymus | 1.7 |
| Kidney | 2.6 |

Column A - Rel. Exp. (%) Ag1450, Run 181080827

Ardais Panel 1.1 Summary: Ag1450 Highest expression of the CG56768-01 gene was seen in a lung cancer sample (CT=21). Expression of this gene was higher in this cancer sample relative to the normal adjacent tissue sample (CT=29). Gene or protein expression levels are useful for the detection of lung cancer. Therapeutic modulation of the activity of this gene or its protein product using nucleic acid, protein, antibody or small molecule drugs is useful in the treatment of lung cancer.
Panel 1.2 Summary: Ag1450 Highest expression of this gene was detected in glioma cell line SF-295 (CT=22). Ibis gene was overexpressed in cell lines derived from CNS malignancies when compared to the low to moderate expression in the samples derived from normal CNS tissue. In addition, there was consistently high expression of this gene in melanoma cell lines, ovarian cancer cell lines and lung cancer cell lines. The CG56768-01 gene encodes a putative Wnt5a-like protein. The Wnt genes belong to a family of protooncogenes with at least 13 known members that are expressed in species ranging from Drosophila to man. The name Wnt denotes the relationship of this family to the Drosophila segment polarity gene ‘wingless’ and to its vertebrate ortholog, Int1, a mouse protooncogene (OMIM 164975, 164820). Therapeutic modulation of the activity of this gene or its protein product using nucleic acid, protein, antibody or small molecule drugs is useful for the treatment of brain cancer, melanoma, ovarian cancer and/or lung cancer.

[0673] Significant levels of expression of this gene were detected in all the regions of the brain examined including amygdala, hippocampus, substantia nigra, thalamus, cerebellum, cerebral cortex, and spinal cord. Wnt-5A signalling is believed to play a critical role in cadherin-mediated cell organization. Cadherins can act as axon guidance and cell adhesion proteins, specifically during development and in the response to injury. Therapeutic modulation of the activity of this gene or its protein product is useful in inducing a compensatory synaptogenic response to neuronal death in Alzheimer's disease, Parkinson's disease, Huntington's disease, spinocerebellar ataxia, progressive supranuclear palsy, ALS, head trauma, stroke, or any other disease/condition associated with neuronal loss.

[0674] Among tissues with metabolic or endocrine function, this gene was expressed at moderate levels in pancreas, adrenal gland, thyroid, pituitary and liver. In addition, this gene was expressed at high levels in skeletal muscle (CT=27). These observations suggest that the Wnt-5A-like protein encoded by this gene may be secreted from skeletal muscle as a paracrine or endocrine signalling molecule acting on other insulin-responsive tissues (i.e., adipose and pancreatic beta cells). Therapeutic modulation of the activity of this gene or its protein product using nucleic acid, protein, antibody or small molecule drugs is useful in the treatment of metabolic diseases involving skeletal muscle, including Type 2 diabetes.

[0675] Panel 2D Summary: Ag1450 Highest expression of this gene was detected in a lung cancer sample (CTs=28-29). This gene was overexpressed in number of cancer tissues relative to the adjacent normal colon, lung, kidney, breast, and stomach. These results are consistent with the observation that the Wnt-5A gene appears to be up-regulated in a number of human malignancies (lozzo R. V., Eichstetter I., Danielson K. G., 1995, Aberrant expression of the growth factor Wnt-5A in human malignancy. Cancer Res. 55: 3495-3499). Therapeutic modulation of the activity of this gene or its protein product is of use in the treatment of colon, lung, kidney, breast or gastric cancers.

[0676] Panel 4.1D Summary: Ag1450 Highest expression of this gene was detected in IL-1 beta activated dermal fibroblasts (CT=26). This gene was expressed mainly in fibroblasts and in LPS-activated monocytes, macrophages and dendritic cells. WNTs are secreted signalling molecules that regulate cell fate and behavior and are involved in embryonic development and hematopoiesis. During inflammation, the Wnt5a-like protein encoded by this gene could potentiate the inflammatory response by acting as an autocrine factor and stimulating monocyte differentiation into dendritic cells as well as by allowing dendritic cells to mature into potent antigen presenting cells. Alternatively, this gene may influence the differentiation of other cell types in the microenvironment including synovial tissues (Sen M., Lauterbach K., El-Gabalawy H., Firestein G. S., Corr M., Carson D. A., 2000, Expression and function of wingless and frizzled homologs in rheumatoid arthritis. Proc. Natl. Acad. Sci. USA 97: 2791-2796). Therapeutic modulation of the activity of this gene or its protein product using nucleic acid, protein, antibody or small molecule drugs is important in reducing or blocking inflammation associated with rheumatoid arthritis, asthma, allergy, psoriasis, IBD and Crohn's disease.

[0677] M. CG59253-01 and CG59253-02: Semaphorin Precursor

[0678] Expression of gene CG59253-01 and CG59253-02 was assessed using the primer-probe sets Ag1492 and Ag2441, described in Tables MA and MB. Results of the RTQ-PCR runs are shown in Tables MC, MD, ME and MF. CG59253-01 represents a full-length physical clone.

TABLE MA
Probe Name Ag1492

| | | | Start | SEQ ID |
|---|---|---|---|---|
| Primers | Sequences | Length | Position No | |
| Forward | 5′-ctgaagctggcatggtac | 22 | 501 | 325 |
| | ttaa-3′ | | | |
| Probe | TET-5′-cagtcctttctctt | 26 | 460 | 326 |
| | tgaacgacagcg-3′-TAMRA | | | |
| Reverse | 5′-ttgtaggcttcaatctct | 22 | 432 | 327 |
| | tcca-3′ | | | |

[0679] TABLE MB
Probe Name Ag2441

| | | | Start | SEQ ID |
|---|---|---|---|---|
| Primers | Sequences | Length | Position | No |
| Forward | 5′-tgctatgaaaggcaagca | 21 | 1506 | 328 |
| | taa-3′ | | | |
| Probe | TET-5′-tgaatgccacaact | 29 | 1474 | 329 |
| | ttatcaaagtatttg-3′- | | | |
| | TAMRA | | | |
| Reverse | 5′-aaaaccatctcatcgttt | 22 | 1449 | 330 |
| | cttg-3′ | | | |

[0680] TABLE MC
AI comprehensive panel v1.0

| Tissue Name | A |
|---|---|
| 110967 COPD-F | 7.5 |
| 110980 COPD-F | 12.4 |
| 110968 COPD-M | 4.4 |
| 110977 COPD-M | 13.1 |
| 110989 Emphysema-F | 4.5 |
| 110992 Emphysema-F | 1.8 |
| 110993 Emphysema-F | 8.0 |
| 110994 Emphysema-F | 3.1 |
| 110995 Emphysema-F | 4.5 |
| 110996 Emphysema-F | 0.1 |
| 110997 Asthma-M | 12.2 |
| 111001 Asthma-F | 8.0 |
| 111002 Asthma-F | 9.2 |
| 111003 Atopic Asthma-F | 6.4 |
| 111004 Atopic Asthma-F | 4.8 |
| 111005 Atopic Asthma-F | 4.7 |
| 111006 Atopic Asthma-F | 0.8 |
| 111417 Allergy-M | 5.6 |
| 112347 Allergy-M | 4.9 |
| 112349 Normal Lung-F | 5.4 |
| 112357 Normal Lung-F | 100.0 |
| 112354 Normal Lung-M | 49.7 |
| 112374 Crohns-F | 3.2 |
| 112389 Match Control Crohns-F | 21.2 |
| 112375 Crohns-F | 3.9 |
| 112732 Match Control Crohns-F | 1.7 |
| 112725 Crohns-M | 5.7 |
| 112387 Match Control Crohns-M | 7.3 |
| 112378 Crohns-M | 9.2 |
| 112390 Match Control Crohns-M | 13.0 |
| 112726 Crohns-M | 16.7 |
| 112731 Match Control Crohns-M | 6.3 |
| 112380 Ulcer Col-F | 5.6 |
| 112734 Match Control Ulcer Col-F | 1.4 |
| 112384 Ulcer Col-F | 12.2 |
| 112737 Match Control Ulcer Col-F | 12.7 |
| 112386 Ulcer Col-F | 3.0 |
| 112738 Match Control Ulcer Col-F | 9.4 |
| 112381 Ulcer Col-M | 2.9 |
| 112735 Match Control Ulcer Col-M | 29.1 |
| 112382 Ulcer Col-M | 33.0 |
| 112394 Match Control Ulcer Col-M | 5.2 |
| 112383 Ulcer Col-M | 4.1 |
| 112736 Match Control Ulcer Col-M | 11.2 |
| 112423 Psoriasis-F | 14.4 |
| 112427 Match Control Psoriasis-F | 13.6 |
| 112418 Psoriasis-M | 7.0 |
| 112723 Match Control Psoriasis-M | 67.4 |
| 112419 Psoriasis-M | 14.1 |
| 112424 Match Control Psoriasis-M | 7.9 |
| 112420 Psoriasis-M | 9.2 |
| 112425 Match Control Psoriasis-M | 15.5 |
| 104689 (MF) OA Bone-Backus | 77.9 |
| 104690 (MF) Adj “Normal” Bone-Backus | 52.5 |
| 104691 (MF) OA Synovium-Backus | 60.3 |
| 104692 (BA) OA Cartilage-Backus | 13.4 |
| 104694 (BA) OA Bone-Backus | 58.6 |
| 104695 (BA) Adj “Normal” Bone-Backus | 40.6 |
| 104696 (BA) OA Synovium-Backus | 50.0 |
| 104700 (SS) OA Bone-Backus | 50.7 |
| 104701 (SS) Adj “Normal” Bone-Backus | 49.0 |
| 104702 (SS) OA Synovium-Backus | 30.8 |
| 117093 OA Cartilage Rep7 | 7.3 |
| 112672 OA Bone5 | 9.8 |
| 112673 OA Synovium5 | 5.5 |
| 112674 OA Synovial Fluid cells5 | 3.3 |
| 117100 OA Cartilage Rep14 | 1.5 |
| 112756 OA Bone9 | 9.9 |
| 112757 OA Synovium9 | 13.8 |
| 112758 OA Synovial Fluid Cells9 | 4.5 |
| 117125 RA Cartilage Rep2 | 9.2 |
| 113492 Bone2 RA | 19.3 |
| 113493 Synovium2 RA | 17.7 |
| 113494 Syn Fluid Cells RA | 24.0 |
| 113499 Cartilage4 RA | 36.3 |
| 113500 Bone4 RA | 43.5 |
| 113501 Synovium4 RA | 34.9 |
| 113502 Syn Fluid Cells4 RA | 15.4 |
| 113495 Cartilage3 RA | 27.2 |
| 113496 Bone3 RA | 19.3 |
| 113497 Synovium3 RA | 10.6 |
| 113498 Syn Fluid Cells3 RA | 27.4 |
| 117106 Normal Cartilage Rep20 | 0.6 |
| 113663 Bone3 Normal | 6.9 |
| 113664 Synovium3 Normal | 1.8 |
| 113665 Syn Fluid Cells3 Normal | 4.3 |
| 117107 Normal Cartilage Rep22 | 4.6 |
| 113667 Bone4 Normal | 7.6 |
| 113668 Synovium4 Normal | 6.8 |
| 113669 Syn Fluid Cells4 Normal | 6.7 |

Column A - Rel. Exp. (%) Ag1492, Run 248065288

[0681] TABLE MD
Panel 1.3D
Column A - Rel. Exp. (%) Ag1492, Run 165529502
Column B - Rel. Exp. (%) Ag2441, Run 159616039
Column C - Rel. Exp. (%) Ag2441, Run 165534561

| Tissue Name | A | B | C |
|---|---|---|---|
| Liver adenocarcinoma | 0.0 | 0.0 | 0.0 |
| Pancreas | 4.5 | 1.4 | 4.5 |
| Pancreatic ca. CAPAN 2 | 0.0 | 0.0 | 0.0 |
| Adrenal gland | 2.8 | 0.8 | 2.5 |
| Thyroid | 4.9 | 3.3 | 2.1 |
| Salivary gland | 2.0 | 1.1 | 2.3 |
| Pituitary gland | 9.2 | 6.6 | 2.9 |
| Brain (fetal) | 44.4 | 12.1 | 26.4 |
| Brain (whole) | 100.0 | 20.0 | 81.2 |
| Brain (amygdala) | 27.7 | 16.8 | 25.5 |
| Brain (cerebellum) | 42.3 | 8.8 | 27.2 |
| Brain (hippocampus) | 50.0 | 77.9 | 26.2 |
| Brain (substantia nigra) | 42.9 | 7.6 | 24.8 |
| Brain (thalamus) | 52.1 | 15.3 | 30.1 |
| Cerebral Cortex | 43.2 | 70.2 | 23.0 |
| Spinal cord | 18.7 | 8.0 | 14.2 |
| glio/astro U87-MG | 2.4 | 3.2 | 1.5 |
| glio/astro U-118-MG | 77.4 | 100.0 | 100.0 |
| astrocytoma SW1783 | 0.0 | 0.6 | 0.3 |
| neuro*; met SK-N-AS | 1.3 | 9.8 | 2.2 |
| astrocytoma SF-539 | 0.0 | 0.0 | 0.0 |
| astrocytoma SNB-75 | 5.4 | 3.8 | 6.2 |
| glioma SNB-19 | 3.3 | 4.6 | 3.9 |
| glioma U251 | 15.8 | 3.3 | 10.6 |
| glioma SF-295 | 10.2 | 10.7 | 14.3 |
| Heart (fetal) | 4.4 | 10.8 | 2.5 |
| Heart | 4.1 | 1.3 | 5.1 |
| Skeletal muscle (fetal) | 4.1 | 35.8 | 1.3 |
| Skeletal muscle | 34.2 | 4.5 | 28.3 |
| Bone marrow | 1.3 | 1.7 | 0.3 |
| Thymus | 1.3 | 0.7 | 1.7 |
| Spleen | 1.2 | 1.1 | 2.5 |
| Lymph node | 3.9 | 1.8 | 3.0 |
| Colorectal | 15.2 | 10.4 | 6.3 |
| Stomach | 6.0 | 2.3 | 4.3 |
| Small intestine | 19.3 | 10.6 | 10.7 |
| Colon ca. SW480 | 0.0 | 0.0 | 0.0 |
| Colon ca.* SW620(SW480 met) | 0.2 | 0.0 | 0.0 |
| Colon ca. HT29 | 0.0 | 0.0 | 0.0 |
| Colon ca. HCT-116 | 0.5 | 0.0 | 0.0 |
| Colon ca. CaCo-2 | 0.5 | 0.6 | 0.0 |
| Colon ca. tissue(ODO3866) | 0.2 | 1.9 | 2.1 |
| Colon ca. HCC-2998 | 0.0 | 0.0 | 0.0 |
| Gastric ca.* (liver met) | 0.0 | 0.0 | 0.0 |
| NCI-N87 | | | |
| Bladder | 3.4 | 1.7 | 3.4 |
| Trachea | 1.5 | 2.4 | 1.4 |
| Kidney | 13.0 | 4.2 | 20.6 |
| Kidney (fetal) | 14.9 | 7.8 | 12.2 |
| Renal ca. 786-0 | 3.9 | 1.8 | 1.2 |
| Renal ca. A498 | 0.6 | 0.3 | 0.0 |
| Renal ca. RXF 393 | 9.8 | 2.2 | 6.8 |
| Renal ca. ACHN | 0.0 | 0.0 | 0.0 |
| Renal ca. UO-31 | 0.2 | 0.2 | 0.7 |
| Renal ca. TK-10 | 0.0 | 0.0 | 0.0 |
| Liver | 4.4 | 0.9 | 2.9 |
| Liver (fetal) | 4.4 | 1.3 | 3.1 |
| Liver ca. (hepatoblast) HepG2 | 0.0 | 0.0 | 0.0 |
| Lung | 5.0 | 11.4 | 4.4 |
| Lung (fetal) | 7.3 | 7.4 | 13.5 |
| Lung ca. (small cell) LX-1 | 0.0 | 0.0 | 0.0 |
| Lung ca. (small cell) NCI-H69 | 4.0 | 23.0 | 18.4 |
| Lung ca. (s. cell var.) SHP-77 | 14.7 | 21.5 | 15.6 |
| Lung ca. (large cell)NCI-H460 | 2.2 | 0.3 | 0.7 |
| Lung ca. (non-sm. cell) A549 | 0.0 | 0.0 | 0.0 |
| Lung ca. (non-s. cell) NCI-H23 | 0.0 | 0.0 | 0.0 |
| Lung ca. (non-s. cell) HOP-62 | 1.3 | 0.9 | 1.4 |
| Lung ca. (non-s. cl) NCI-H522 | 0.0 | 0.0 | 0.0 |
| Lung ca. (squam.) SW 900 | 5.0 | 4.1 | 5.1 |
| Lung ca. (squam.) NCI-H596 | 9.9 | 7.1 | 13.7 |
| Mammary gland | 20.2 | 10.1 | 6.9 |
| Breast ca.* (pl. ef) MCF-7 | 0.0 | 0.0 | 0.1 |
| Breast ca.* (pl. ef) | 0.0 | 0.3 | 0.3 |
| MDA-MB-231 | | | |
| Breast ca.* (pl. ef) T47D | 0.0 | 0.0 | 0.0 |
| Breast ca. BT-549 | 0.0 | 0.0 | 0.0 |
| Breast ca. MDA-N | 0.6 | 2.3 | 0.3 |
| Ovary | 9.8 | 20.6 | 3.8 |
| Ovarian ca. OVCAR-3 | 5.6 | 3.3 | 6.3 |
| Ovarian ca. OVCAR-4 | 0.0 | 0.0 | 0.0 |
| Ovarian ca. OVCAR-5 | 0.3 | 0.0 | 0.0 |
| Ovarian ca. OVCAR-8 | 0.8 | 1.8 | 0.7 |
| Ovarian ca. IGROV-1 | 0.0 | 0.0 | 0.0 |
| Ovarian ca.* (ascites) | 0.0 | 0.0 | 0.0 |
| SK-OV-3 | | | |
| Uterus | 3.3 | 0.9 | 3.7 |
| Placenta | 17.8 | 14.8 | 8.1 |
| Prostate | 3.7 | 0.6 | 1.4 |
| Prostate ca.* (bone met)PC-3 | 1.4 | 2.2 | 4.8 |
| Testis | 1.8 | 0.8 | 1.3 |
| Melanoma Hs688(A).T | 0.0 | 0.0 | 0.1 |
| Melanoma* (met) Hs688(B).T | 0.0 | 0.5 | 0.6 |
| Melanoma UACC-62 | 5.7 | 0.9 | 2.3 |
| Melanoma M14 | 6.1 | 1.3 | 9.2 |
| Melanoma LOX IMVI | 0.0 | 0.0 | 0.0 |
| Melanoma* (met) SK-MEL-5 | 2.0 | 2.3 | 1.3 |
| Adipose | 8.3 | 5.7 | 9.8 |

[0682] TABLE ME
Panel 2D

| Tissue Name | A |
|---|---|
| Normal Colon | 48.6 |
| CC Well to Mod Diff (ODO3866) | 0.6 |
| CC Margin (ODO3866) | 6.6 |
| CC Gr.2 rectosigmoid (ODO3868) | 0.9 |
| CC Margin (ODO3868) | 1.2 |
| CC Mod Diff (ODO3920) | 0.5 |
| CC Margin (ODO3920) | 9.1 |
| CC Gr.2 ascend colon (ODO3921) | 10.9 |
| CC Margin (ODO3921) | 6.7 |
| CC from Partial Hepatectomy (ODO4309) Mets | 2.0 |
| Liver Margin (ODO4309) | 3.5 |
| Colon mets to lung (OD04451-01) | 0.6 |
| Lung Margin (OD04451-02) | 3.5 |
| Normal Prostate 6546-1 | 1.4 |
| Prostate Cancer (OD04410) | 2.9 |
| Prostate Margin (OD04410) | 8.0 |
| Prostate Cancer (OD04720-01) | 6.6 |
| Prostate Margin (OD04720-02) | 13.3 |
| Normal Lung 061010 | 14.4 |
| Lung Met to Muscle (ODO4286) | 0.1 |
| Muscle Margin (ODO4286) | 4.5 |
| Lung Malignant Cancer (OD03126) | 4.3 |
| Lung Margin (OD03126) | 15.0 |
| Lung Cancer (OD04404) | 8.4 |
| Lung Margin (OD04404) | 3.7 |
| Lung Cancer (OD04565) | 1.1 |
| Lung Margin (OD04565) | 4.7 |
| Lung Cancer (OD04237-01) | 1.2 |
| Lung Margin (OD04237-02) | 5.6 |
| Ocular Mel Met to Liver (ODO4310) | 2.7 |
| Liver Margin (ODO4310) | 3.0 |
| Melanoma Mets to Lung (OD04321) | 0.7 |
| Lung Margin (OD04321) | 8.0 |
| Normal Kidney | 100.0 |
| Kidney Ca, Nuclear grade 2 (OD04338) | 3.6 |
| Kidney Margin (OD04338) | 32.5 |
| Kidney Ca Nuclear grade ½ (OD04339) | 0.5 |
| Kidney Margin (OD04339) | 26.8 |
| Kidney Ca, Clear cell type (OD04340) | 3.8 |
| Kidney Margin (OD04340) | 35.4 |
| Kidney Ca, Nuclear grade 3 (OD04348) | 0.2 |
| Kidney Margin (OD04348) | 15.7 |
| Kidney Cancer (OD04622-01) | 1.1 |
| Kidney Margin (OD04622-03) | 4.2 |
| Kidney Cancer (OD04450-01) | 8.0 |
| Kidney Margin (OD04450-03) | 25.0 |
| Kidney Cancer 8120607 | 0.6 |
| Kidney Margin 8120608 | 2.6 |
| Kidney Cancer 8120613 | 0.4 |
| Kidney Margin 8120614 | 11.5 |
| Kidney Cancer 9010320 | 1.7 |
| Kidney Margin 9010321 | 11.3 |
| Normal Uterus | 0.9 |
| Uterus Cancer 064011 | 3.4 |
| Normal Thyroid | 3.9 |
| Thyroid Cancer 064010 | 2.0 |
| Thyroid Cancer A302152 | 0.6 |
| Thyroid Margin A302153 | 10.8 |
| Normal Breast | 12.2 |
| Breast Cancer (OD04566) | 0.4 |
| Breast Cancer (OD04590-01) | 7.3 |
| Breast Cancer Mets (OD04590-03) | 4.8 |
| Breast Cancer Metastasis (OD04655-05) | 3.6 |
| Breast Cancer 064006 | 2.0 |
| Breast Cancer 1024 | 5.4 |
| Breast Cancer 9100266 | 2.1 |
| Breast Margin 9100265 | 7.4 |
| Breast Cancer A209073 | 8.5 |
| Breast Margin A209073 | 13.8 |
| Normal Liver | 2.7 |
| Liver Cancer 064003 | 0.1 |
| Liver Cancer 1025 | 2.3 |
| Liver Cancer 1026 | 0.7 |
| Liver Cancer 6004-T | 4.0 |
| Liver Tissue 6004-N | 0.3 |
| Liver Cancer 6005-T | 0.5 |
| Liver Tissue 6005-N | 0.6 |
| Normal Bladder | 4.7 |
| Bladder Cancer 1023 | 0.1 |
| Bladder Cancer A302173 | 4.9 |
| Bladder Cancer (OD04718-01) | 0.0 |
| Bladder Normal Adjacent (OD04718-03) | 2.8 |
| Normal Ovary | 7.2 |
| Ovarian Cancer 064008 | 6.8 |
| Ovarian Cancer (OD04768-07) | 0.2 |
| Ovary Margin (OD04768-08) | 1.0 |
| Normal Stomach | 6.3 |
| Gastric Cancer 9060358 | 1.6 |
| Stomach Margin 9060359 | 2.1 |
| Gastric Cancer 9060395 | 4.2 |
| Stomach Margin 9060394 | 4.2 |
| Gastric Cancer 9060397 | 1.6 |
| Stomach Margin 9060396 | 0.5 |
| Gastric Cancer 064005 | 8.9 |

Column A - Rel. Exp. (%) Ag2441, Run 159616246

[0683] TABLE MF
Panel 4D
Column A - Rel. Exp. (%) Ag1492, Run 162778150
Column B - Rel. Exp. (%) Ag2441, Run 159616279

| Tissue Name | A | B |
|---|---|---|
| Secondary Th1 act | 0.0 | 0.0 |
| Secondary Th2 act | 0.0 | 0.0 |
| Secondary Tr1 act | 0.0 | 0.0 |
| Secondary Th1 rest | 0.0 | 0.0 |
| Secondary Th2 rest | 0.0 | 0.0 |
| Secondary Tr1 rest | 0.0 | 0.0 |
| Primary Th1 act | 0.0 | 0.0 |
| Primary Th2 act | 0.0 | 0.0 |
| Primary Tr1 act | 0.0 | 0.0 |
| Primary Th1 rest | 0.0 | 0.0 |
| Primary Th2 rest | 0.0 | 0.0 |
| Primary Tr1 rest | 0.0 | 0.0 |
| CD45RA CD4 lymphocyte act | 0.4 | 0.6 |
| CD45RO CD4 lymphocyte act | 0.0 | 0.0 |
| CD8 lymphocyte act | 0.0 | 0.0 |
| Secondary CD8 lymphocyte rest | 0.0 | 0.0 |
| Secondary CD8 lymphocyte act | 0.0 | 0.0 |
| CD4 lymphocyte none | 0.0 | 0.0 |
| 2ry Th1/Th2/Tr1_anti-CD95 CH11 | 0.0 | 0.0 |
| LAK cells rest | 0.0 | 0.0 |
| LAK cells IL-2 | 0.0 | 0.0 |
| LAK cells IL-2 + IL-12 | 0.0 | 0.0 |
| LAK cells IL-2 + IFN gamma | 0.0 | 0.0 |
| LAK cells IL-2 + IL-18 | 0.0 | 0.0 |
| LAK cells PMA/ionomycin | 0.0 | 0.0 |
| NK Cells IL-2 rest | 0.0 | 0.0 |
| Two Way MLR 3 day | 0.0 | 0.0 |
| Two Way MLR 5 day | 0.0 | 0.0 |
| Two Way MLR 7 day | 0.0 | 0.0 |
| PBMC rest | 0.0 | 0.0 |
| PBMC PWM | 0.2 | 0.0 |
| PBMC PHA-L | 0.0 | 0.0 |
| Ramos (B cell) none | 0.0 | 0.0 |
| Ramos (B cell) ionomycin | 0.0 | 0.0 |
| B lymphocytes PWM | 0.3 | 0.0 |
| B lymphocytes CD40L and IL-4 | 0.4 | 0.3 |
| EOL-1 dbcAMP | 0.0 | 0.0 |
| EOL-1 dbcAMP PMA/ionomycin | 0.0 | 0.0 |
| Dendritic cells none | 0.0 | 0.0 |
| Dendritic cells LPS | 0.1 | 0.0 |
| Dendritic cells anti-CD40 | 0.0 | 0.1 |
| Monocytes rest | 0.0 | 0.0 |
| Monocytes LPS | 0.0 | 0.0 |
| Macrophages rest | 0.0 | 0.3 |
| Macrophages LPS | 0.0 | 0.0 |
| HUVEC none | 11.6 | 5.8 |
| HUVEC starved | 19.3 | 18.0 |
| HUVEC IL-1beta | 12.5 | 9.6 |
| HUVEC IFN gamma | 5.5 | 6.2 |
| HUVEC TNF alpha + IFN gamma | 3.6 | 1.9 |
| HUVEC TNF alpha + IL4 | 5.6 | 5.0 |
| HUVEC IL-11 | 8.5 | 6.5 |
| Lung Microvascular EC none | 0.4 | 0.1 |
| Lung Microvascular EC TNFalpha + | 0.0 | 0.0 |
| IL-1beta | | |
| Microvascular Dermal EC none | 0.1 | 0.1 |
| Microsvasular Dermal EC TNFalpha + | 0.0 | 0.0 |
| IL-1beta | | |
| Bronchial epithelium TNFalpha + | 2.1 | 2.7 |
| IL1beta | | |
| Small airway epithelium none | 0.5 | 0.5 |
| Small airway epithelium TNFalpha + | 1.1 | 0.8 |
| IL-1beta | | |
| Coronery artery SMC rest | 1.2 | 1.5 |
| Coronery artery SMC TNFalpha + | 0.4 | 0.3 |
| IL-1beta | | |
| Astrocytes rest | 1.5 | 1.3 |
| Astrocytes TNFalpha + IL-1beta | 0.0 | 0.1 |
| KU-812 (Basophil) rest | 0.0 | 0.0 |
| KU-812 (Basophil) PMA/ionomycin | 0.0 | 0.0 |
| CCD1106 (Keratinocytes) none | 0.9 | 0.5 |
| CCD1106 (Keratinocytes) TNFalpha + | 0.0 | 0.1 |
| IL-1beta | | |
| Liver cirrhosis | 5.7 | 2.6 |
| Lupus kidney | 4.5 | 2.4 |
| NCI-H292 none | 5.3 | 4.9 |
| NCI-H292 IL-4 | 3.0 | 4.9 |
| NCI-H292 IL-9 | 5.2 | 5.3 |
| NCI-H292 IL-13 | 2.5 | 1.6 |
| NCI-H292 IFN gamma | 1.8 | 0.0 |
| HPAEC none | 3.7 | 5.2 |
| HPAEC TNF alpha + IL-1 beta | 6.5 | 4.3 |
| Lung fibroblast none | 16.2 | 10.4 |
| Lung fibroblast TNF alpha + IL-1 beta | 81.2 | 65.5 |
| Lung fibroblast IL-4 | 12.0 | 12.9 |
| Lung fibroblast IL-9 | 22.2 | 13.3 |
| Lung fibroblast IL-13 | 7.9 | 5.9 |
| Lung fibroblast IFN gamma | 10.2 | 7.8 |
| Dermal fibroblast CCD1070 rest | 3.3 | 2.4 |
| Dermal fibroblast CCD1070 TNF alpha | 2.5 | 4.5 |
| Dermal fibroblast CCD1070 IL-1 beta | 6.0 | 5.1 |
| Dermal fibroblast IFN gamma | 2.1 | 0.7 |
| Dermal fibroblast IL-4 | 9.7 | 7.7 |
| IBD Colitis 2 | 1.7 | 0.2 |
| IBD Crohn's | 13.7 | 7.7 |
| Colon | 98.6 | 95.3 |
| Lung | 17.2 | 16.0 |
| Thymus | 100.0 | 100.0 |
| Kidney | 6.3 | 4.2 |

AI_comprehensive panel_v1.0 Summary: Ag1492 Highest expression of the CG59253-01 and CG59253-02 genes was detected in normal lung (CT=27.6). Significant expression of these genes was detected in samples derived from normal and orthoarthitis/rheumatoid arthritis bone, cartilage, synovium and synovial fluid samples, normal lung, COPD lung, emphysema, atopic asthma, asthma, allergy, Crohn's disease (normal matched control and diseased), ulcerative colitis (normal matched control and diseased), and psoriasis (normal matched control and diseased). Therapeutic modulation of the activity of these gene variants or their protein products is useful in the treatment of autoimmune and inflammatory disorders including psoriasis, allergy, asthma, inflammatory bowel disease, rheumatoid arthritis and osteoarthritis
Panel 1.3D Summary: Ag1492/Ag2441 The CG59253-01 and CG59253-02 genes encode a semaphorin homolog that had brain-preferential expression. Highest expression of these variants was seen in the brain and a brain cancer cell line (CTs=28-29). Semaphorins can act as axon guidance proteins, specifically as chemorepellents that inhibit CNS regenerative capacity. Manipulation of levels of these gene variants or their protein products is useful in inducing a compensatory synaptogenic response to neuronal death in Alzheimer's disease, Parkinson's disease, Huntington's disease, spinocerebellar ataxia, progressive supranuclear palsy, multiple sclerosis, ALS, head trauma, stroke, or any other disease/condition associated with neuronal loss. Therapeutic modulation of the activity of these gene variants or their protein products using nucleic acid, protein, antibody or small molecule drugs is useful in the treatment of brain cancer.

[0686] This gene was also moderately expressed in several metabolic tissues, including pancreas, adrenal, thyroid, pituitary, adult and fetal heart, adult and fetal skeletal muscle, adult and fetal liver, and adipose. Gene or protein expression levels are important for the pathogenesis, diagnosis, and/or treatment of metabolic diseases including obesity and Types 1 and 2 diabetes.

[0687] Panel 2D Summary: Ag2441 Highest expression of the CG59253-01 and CG59253-02 gene variants was detected in normal kidney (CT=27.6). These variants were more highly expressed in normal kidney samples relative to the matched kidney cancers. Gene or protein levels are useful to distinguish normal kidney from kidney cancer. These genes encode variants of the semaphorin SEMA6D protein. The semaphorin family of proteins is characterized as cell surface receptors for their ligands, the pillins, and is involved largely in cell guidance (Tamagnone L, Comoglio P M. Signaling by semaphorin receptors: cell guidance and beyond. Trends Cell Biol 2000 September; 10(9):377-83). Semaphorins have been implicated in general invasive growth and potentially even tube formation (Comoglio P M, Tamagnone L, Boccaccio C. Plasminogen-related growth factor and semaphorin receptors: a gene superfamily controlling invasive growth. Exp Cell Res Nov. 25, 1999;253(1):88-99). Thus, semaphorins are likely agents to promote the differentiation of cells. Normal kidney cells undergo a great deal of tubular morphogenesis. Therefore, the extracellular domain of these protein products may act to promote growth arrest and differentiation of the cancer cells through interaction with a membrane bound ligand or ligand complexed with plexins. Therapeutic modulation of the activity of these gene variants or their protein products using nucleic acid, protein, antibody or small molecule drugs is of use in the treatment of kidney cancer.

[0688] Panel 4D Summary: Ag1492/2441 Highest expression of the CG59253-01 and CG59253-02 gene variants was detected in thymus (CTs=27-28). Significant expression of these variants was also seen activated lung fibroblasts cells, HUVEC, HPAEC, activated bronchial epithelium, NCI-H292 cell, dermal fibroblasts, IBD Crohn's, liver cirrhosis and lupus samples, normal tissues colon and thymus. Therapeutic modulation of the activity of these gene variants or their protein products is useful to reduce or eliminate the symptoms of chronic obstructive pulmonary disease, asthma, emphysema, and ulcerative colitis

[0689] N. CG95430-01: AdipoQ-like

[0690] Expression of gene CG95430-01 was assessed using the primer-probe set Ag4020, described in Table NA. Results of the RTQ-PCR runs are shown in Tables NB, NC, ND, NE and NF.

TABLE NA
Probe Name Ag4020

| | | | Start | SEQ ID |
|---|---|---|---|---|
| Primers | Sequences | Length | Position | No |
| Forward | 5′-cacattgctggggtctat | 22 | 458 | 331 |
| | tact-3′ | | | |
| Probe | TET-5′-tcacctaccacatc | 27 | 480 | 332 |
| | actgttttctcca-3′- | | | |
| | TAMRA | | | |
| Reverse | 5′-ttttgaccaaagacacct | 22 | 512 | 333 |
| | gaac-3′ | | | |

[0691] TABLE NB
CNS neurodegeneration v1.0

| Tissue Name | A |
|---|---|
| AD 1 Hippo | 40.1 |
| AD 2 Hippo | 19.3 |
| AD 3 Hippo | 22.2 |
| AD 4 Hippo | 26.4 |
| AD 5 Hippo | 4.9 |
| AD 6 Hippo | 100.0 |
| Control 2 Hippo | 26.8 |
| Control 4 Hippo | 21.2 |
| Control (Path) 3 Hippo | 14.9 |
| AD 1 Temporal Ctx | 11.1 |
| AD 2 Temporal Ctx | 10.3 |
| AD 3 Temporal Ctx | 6.0 |
| AD 4 Temporal Ctx | 15.8 |
| AD 5 Inf Temporal Ctx | 9.8 |
| AD 5 Sup Temporal Ctx | 31.2 |
| AD 6 Inf Temporal Ctx | 13.7 |
| AD 6 Sup Temporal Ctx | 8.0 |
| Control 1 Temporal Ctx | 2.4 |
| Control 2 Temporal Ctx | 3.2 |
| Control 3 Temporal Ctx | 8.9 |
| Control 3 Temporal Ctx | 0.8 |
| Control (Path) 1 Temporal Ctx | 6.0 |
| Control (Path) 2 Temporal Ctx | 4.3 |
| Control (Path) 3 Temporal Ctx | 7.6 |
| Control (Path) 4 Temporal Ctx | 7.7 |
| AD 1 Occipital Ctx | 5.8 |
| AD 2 Occipital Ctx (Missing) | 12.5 |
| AD 3 Occipital Ctx | 4.8 |
| AD 4 Occipital Ctx | 3.9 |
| AD 5 Occipital Ctx | 3.5 |
| AD 6 Occipital Ctx | 3.4 |
| Control 1 Occipital Ctx | 7.3 |
| Control 2 Occipital Ctx | 3.9 |
| Control 3 Occipital Ctx | 6.7 |
| Control 4 Occipital Ctx | 1.8 |
| Control (Path) 1 Occipital Ctx | 12.5 |
| Control (Path) 2 Occipital Ctx | 3.1 |
| Control (Path) 3 Occipital Ctx | 2.8 |
| Control (Path) 4 Occipital Ctx | 6.7 |
| Control 1 Parietal Ctx | 3.3 |
| Control 2 Parietal Ctx | 7.5 |
| Control 3 Parietal Ctx | 9.5 |
| Control (Path) 1 Parietal Ctx | 8.4 |
| Control (Path) 2 Parietal Ctx | 6.1 |
| Control (Path) 3 Parietal Ctx | 6.0 |
| Control (Path) 4 Parietal Ctx | 4.7 |

Column A - Rel. Exp. (%) Ag4020, Run 212393803

[0692] TABLE NC
Oncology cell line screening panel v3.1

| Tissue Name | A |
|---|---|
| Daoy Medulloblastoma/Cerebellum | 1.1 |
| TE671 Medulloblastom/Cerebellum | 0.0 |
| D283 Med Medulloblastoma/Cerebellum | 3.3 |
| PFSK-1 Primitive Neuroectodermal/Cerebellum | 0.0 |
| XF-498_CNS | 10.3 |
| SNB-78_CNS/glioma | 0.0 |
| SF-268_CNS/glioblastoma | 18.7 |
| T98G_Glioblastoma | 5.4 |
| SK-N-SH_Neuroblastoma (metastasis) | 2.9 |
| SF-295_CNS/glioblastoma | 0.0 |
| Cerebellum | 6.7 |
| Cerebellum | 2.5 |
| NCI-H292_Mucoepidermoid lung ca. | 7.7 |
| DMS-114_Small cell lung cancer | 8.5 |
| DMS-79_Small cell lung cancer/neuroendocrine | 1.6 |
| NCI-H146_Small cell lung cancer/neuroendocrine | 4.5 |
| NCI-H526_Small cell lung cancer/neuroendocrine | 5.5 |
| NCI-N417_Small cell lung cancer/neuroendocrine | 1.7 |
| NCI-H82_Small cell lung cancer/neuroendocrine | 9.3 |
| NCI-H157_Squamous cell lung cancer (metastasis) | 0.0 |
| NCI-H1155_Large cell lung cancer/neuroendocrine | 6.2 |
| NCI-H1299_Large cell lung cancer/neuroendocrine | 5.2 |
| NCI-H727_Lung carcinoid | 0.0 |
| NCI-UMC-11_Lung carcinoid | 1.2 |
| LX-1_Small cell lung cancer | 1.6 |
| Colo-205_Colon cancer | 18.6 |
| KM12_Colon cancer | 11.0 |
| KM20L2_Colon cancer | 1.1 |
| NCI-H716_Colon cancer | 6.3 |
| SW-48_Colon adenocarcinoma | 3.7 |
| SW1116_Colon adenocarcinoma | 11.7 |
| LS 174T_Colon adenocarcinoma | 27.9 |
| SW-948_Colon adenocarcinoma | 4.2 |
| SW-480_Colon adenocarcinoma | 2.0 |
| NCI-SNU-5_Gastric ca. | 9.9 |
| KATO III_Stomach | 9.3 |
| NCI-SNU-16_Gastric ca. | 4.7 |
| NCI-SNU-1_Gastric ca. | 9.2 |
| RF-1_Gastric adenocarcinoma | 1.2 |
| RF-48_Gastric adenocarcinoma | 7.6 |
| MKN-45_Gastric ca. | 20.3 |
| NCI-N87_Gastric ca. | 14.4 |
| OVCAR-5_Ovarian ca. | 0.0 |
| RL95-2_Uterine carcinoma | 2.3 |
| HelaS3_Cervical adenocarcinoma | 10.1 |
| Ca Ski_Cervical epidermoid carcinoma (metastasis) | 7.9 |
| ES-2_Ovarian clear cell carcinoma | 2.4 |
| Ramos/6 h stim_Stimulated with PMA/ionomycin 6 h | 0.0 |
| Ramos/14 h stim_Stimulated with PMA/ionomycin 14 h | 0.0 |
| MEG-01_Chronic myelogenous leukemia (megokaryoblast) | 1.4 |
| Raji_Burkitt's lymphoma | 0.0 |
| Daudi_Burkitt's lymphoma | 0.0 |
| U266_B-cell plasmacytoma/myeloma | 0.0 |
| CA46_Burkitt's lymphoma | 1.2 |
| RL_non-Hodgkin's B-cell lymphoma | 0.0 |
| JM1_pre-B-cell lymphoma/leukemia | 2.0 |
| Jurkat_T cell leukemia | 7.5 |
| TF-1_Erythroleukemia | 2.3 |
| HUT 78_T-cell lymphoma | 1.7 |
| U937_Histiocytic lymphoma | 9.2 |
| KU-812_Myelogenous leukemia | 7.7 |
| 769-P_Clear cell renal ca. | 0.0 |
| Caki-2_Clear cell renal ca. | 13.5 |
| SW 839_Clear cell renal ca. | 0.0 |
| G401_Wilms' tumor | 0.9 |
| Hs766T_Pancreatic ca. (LN metastasis) | 21.3 |
| CAPAN-1_Pancreatic adenocarcinoma (liver metastasis) | 0.0 |
| SU86.86_Pancreatic carcinoma (liver metastasis) | 0.9 |
| BxPC-3_Pancreatic adenocarcinoma | 7.7 |
| HPAC_Pancreatic adenocarcinoma | 1.0 |
| MIA PaCa-2_Pancreatic ca. | 0.0 |
| CFPAC-1_Pancreatic ductal adenocarcinoma | 71.2 |
| PANC-1_Pancreatic epithelioid ductal ca. | 3.0 |
| T24_Bladder ca. (transitional cell) | 0.0 |
| 5637_Bladder ca. | 1.9 |
| HT-1197_Bladder ca. | 0.0 |
| UM-UC-3_Bladder ca. (transitional cell) | 0.0 |
| A204_Rhabdomyosarcoma | 6.2 |
| HT-1080_Fibrosarcoma | 30.6 |
| MG-63_Osteosarcoma (bone) | 4.2 |
| SK-LMS-1_Leiomyosarcoma (vulva) | 7.3 |
| SJRH30_Rhabdomyosarcoma (met to bone marrow) | 4.4 |
| A431_Epidermoid ca. | 100.0 |
| WM266-4_Melanoma | 1.9 |
| DU 145_Prostate | 0.7 |
| MDA-MB-468_Breast adenocarcinoma | 0.0 |
| SSC-4_Tongue | 1.5 |
| SSC-9_Tongue | 0.0 |
| SSC-15_Tongue | 1.2 |
| CAL 27_Squamous cell ca. of tongue | 2.9 |

Column A - Rel. Exp. (%) Ag4020, Run 22254637

[0693] TABLE ND
Panel 4.1D

| Tissue Name | A |
|---|---|
| Secondary Th1 act | 2.4 |
| Secondary Th2 act | 10.7 |
| Secondary Tr1 act | 1.5 |
| Secondary Th1 rest | 1.9 |
| Secondary Th2 rest | 2.5 |
| Secondary Tr1 rest | 0.0 |
| Primary Th1 act | 1.5 |
| Primary Th2 act | 3.6 |
| Primary Tr1 act | 1.6 |
| Primary Th1 rest | 1.3 |
| Primary Th2 rest | 0.6 |
| Primary Tr1 rest | 0.0 |
| CD45RA CD4 lymphocyte act | 3.4 |
| CD45RO CD4 lymphocyte act | 3.2 |
| CD8 lymphocyte act | 1.4 |
| Secondary CD8 lymphocyte rest | 4.9 |
| Secondary CD8 lymphocyte act | 0.0 |
| CD4 lymphocyte none | 0.0 |
| 2ry Th1/Th2/Tr1_anti-CD95 CH11 | 0.0 |
| LAK cells rest | 2.1 |
| LAK cells IL-2 | 6.3 |
| LAK cells IL-2 + IL-12 | 2.3 |
| LAK cells IL-2 + IFN gamma | 2.3 |
| LAK cells IL-2 + IL-18 | 2.4 |
| LAK cells PMA/ionomycin | 0.6 |
| NK Cells IL-2 rest | 6.0 |
| Two Way MLR 3 day | 1.6 |
| Two Way MLR 5 day | 0.0 |
| Two Way MLR 7 day | 0.0 |
| PBMC rest | 1.1 |
| PBMC PWM | 0.0 |
| PBMC PHA-L | 0.0 |
| Ramos (B cell) none | 0.0 |
| Ramos (B cell) ionomycin | 0.0 |
| IB lymphocytes PWM | 0.0 |
| B lymphocytes CD40L and IL-4 | 0.0 |
| EOL-1 dbcAMP | 0.0 |
| EOL-1 dbcAMP PMA/ionomycin | 0.0 |
| Dendritic cells none | 2.9 |
| Dendritic cells LPS | 0.0 |
| Dendritic cells anti-CD40 | 2.6 |
| Monocytes rest | 2.0 |
| Monocytes LPS | 0.0 |
| Macrophages rest | 2.2 |
| Macrophages LPS | 2.1 |
| HUVEC none | 0.0 |
| HUVEC starved | 0.9 |
| HUVEC IL-1beta | 1.1 |
| HUVEC IFN gamma | 0.0 |
| HUVEC TNF alpha + IFN gamma | 1.0 |
| HUVEC TNF alpha + IL4 | 1.0 |
| HUVEC IL-11 | 0.7 |
| Lung Microvascular EC none | 1.0 |
| Lung Microvascular EC TNFalpha + IL-1beta | 0.0 |
| Microvascular Dermal EC none | 1.4 |
| Microsvasular Dermal EC TNFalpha + IL-1beta | 0.0 |
| Bronchial epithelium TNFalpha + IL1beta | 5.0 |
| Small airway epithelium none | 0.0 |
| Small airway epithelium TNFalpha + IL-1beta | 2.9 |
| Coronery artery SMC rest | 1.2 |
| Coronery artery SMC TNFalpha + IL-1beta | 2.5 |
| Astrocytes rest | 3.6 |
| Astrocytes TNFalpha + IL-1beta | 1.5 |
| KU-812 (Basophil) rest | 6.9 |
| KU-812 (Basophil) PMA/ionomycin | 0.0 |
| CCD1106 (Keratinocytes) none | 8.5 |
| CCD1106 (Keratinocytes) TNFalpha + IL-1beta | 1.3 |
| Liver cirrhosis | 6.6 |
| NCI-H292 none | 2.5 |
| NCI-H292 IL-4 | 0.0 |
| NCI-H292 IL-9 | 1.8 |
| NCI-H292 IL-13 | 5.9 |
| NCI-H292 IFN gamma | 0.9 |
| HPAEC none | 3.5 |
| HPAEC TNF alpha + IL-1 beta | 2.6 |
| Lung fibroblast none | 64.6 |
| Lung fibroblast TNF alpha + IL-1 beta | 1.8 |
| Lung fibroblast IL-4 | 25.5 |
| Lung fibroblast IL-9 | 14.8 |
| Lung fibroblast IL-13 | 26.1 |
| Lung fibroblast IFN gamma | 33.4 |
| Dermal fibroblast CCD1070 rest | 3.3 |
| Dermal fibroblast CCD1070 TNF alpha | 4.3 |
| Dermal fibroblast CCD1070 IL-1 beta | 2.8 |
| Dermal fibroblast IFN gamma | 1.2 |
| Dermal fibroblast IL-4 | 1.4 |
| Dermal Fibroblasts rest | 10.5 |
| Neutrophils TNFa + LPS | 0.0 |
| Neutrophils rest | 1.2 |
| Colon | 3.0 |
| Lung | 10.0 |
| Thymus | 19.6 |
| Kidney | 100.0 |

Column A - Rel. Exp. (%) Ag4020, Run 171614122

[0694] TABLE NE
Panel 5 Islet

| Tissue Name | A |
|---|---|
| 97457_Patient-02go_adipose | 22.5 |
| 97476_Patient-07sk_skeletal muscle | 41.8 |
| 97477_Patient-07ut_uterus | 5.3 |
| 97478_Patient-07pl_placenta | 2.7 |
| 99167_Bayer Patient 1 | 0.0 |
| 97482_Patient-08ut_uterus | 5.2 |
| 97483_Patient-08pl_placenta | 4.6 |
| 97486_Patient-09sk_skeletal muscle | 15.2 |
| 97487_Patient-09ut_uterus | 21.9 |
| 97488_Patient-09pl_placenta | 4.5 |
| 97492_Patient-10ut_uterus | 12.2 |
| 97493_Patient-10pl_placenta | 4.5 |
| 97495_Patient-11go_adipose | 31.4 |
| 97496_Patient-11sk_skeletal muscle | 38.2 |
| 97497_Patient-11ut_uterus | 8.4 |
| 97498_Patient-11pl_placenta | 2.2 |
| 97500_Patient-12go_adipose | 45.4 |
| 97501_Patient-12sk_skeletal muscle | 100.0 |
| 97502_Patient-12ut_uterus | 15.4 |
| 97503_Patient-12pl_placenta | 6.0 |
| 94721_Donor 2 U - A_Mesenchymal Stem Cells | 0.0 |
| 94722_Donor 2 U - B_Mesenchymal Stem Cells | 0.9 |
| 94723_Donor 2 U - C_Mesenchymal Stem Cells | 1.3 |
| 94709_Donor 2 AM - A_adipose | 2.2 |
| 94710_Donor 2 AM - B_adipose | 0.0 |
| 94711_Donor 2 AM - C_adipose | 0.8 |
| 94712_Donor 2 AD - A_adipose | 0.0 |
| 94713_Donor 2 AD - B_adipose | 5.1 |
| 94714_Donor 2 AD - C_adipose | 0.0 |
| 94742_Donor 3 U - A_Mesenchymal Stem Cells | 1.4 |
| 94743_Donor 3 U - B_Mesenchymal Stem Cells | 0.0 |
| 94730_Donor 3 AM - A_adipose | 4.3 |
| 94731_Donor 3 AM - B_adipose | 3.7 |
| 94732_Donor 3 AM - C_adipose | 0.0 |
| 94733_Donor 3 AD - A_adipose | 0.0 |
| 94734_Donor 3 AD - B_adipose | 1.6 |
| 94735_Donor 3 AD - C_adipose | 0.0 |
| 77138_Liver_HepG2untreated | 5.3 |
| 73556_Heart_Cardiac stromal cells (primary) | 0.0 |
| 81735_Small Intestine | 12.8 |
| 72409_Kidney_Proximal Convoluted Tubule | 0.0 |
| 82685_Small intestine_Duodenum | 4.4 |
| 90650_Adrenal_Adrenocortical adenoma | 0.0 |
| 72410_Kidney_HRCE | 0.0 |
| 72411_Kidney_HRE | 0.0 |
| 73139_Uterus_Uterine smooth muscle cells | 5.5 |

Column A - Rel. Exp. (%) Ag4020, Run 223675497

[0695] TABLE NF
general oncology screening panel v 2.4

| Tissue Name | A |
|---|---|
| Colon cancer 1 | 20.0 |
| Colon cancer NAT 1 | 1.1 |
| Colon cancer 2 | 11.0 |
| Colon cancer NAT 2 | 8.0 |
| Colon cancer 3 | 27.4 |
| Colon cancer NAT 3 | 49.0 |
| Colon malignant cancer 4 | 28.1 |
| Colon normal adjacent tissue 4 | 4.6 |
| Lung cancer 1 | 3.4 |
| Lung NAT 1 | 3.2 |
| Lung cancer 2 | 68.8 |
| Lung NAT 2 | 8.2 |
| Squamous cell carcinoma 3 | 9.7 |
| Lung NAT 3 | 2.1 |
| metastatic melanoma 1 | 33.4 |
| Melanoma 2 | 5.3 |
| Melanoma 3 | 11.3 |
| metastatic melanoma 4 | 40.3 |
| metastatic melanoma 5 | 100.0 |
| Bladder cancer 1 | 10.3 |
| Bladder cancer NAT 1 | 0.0 |
| Bladder cancer 2 | 5.5 |
| Bladder cancer NAT 2 | 1.8 |
| Bladder cancer NAT 3 | 1.1 |
| Bladder cancer NAT 4 | 27.4 |
| Prostate adenocarcinoma 1 | 8.9 |
| Prostate adenocarcinoma 2 | 12.3 |
| Prostate adenocarcinoma 3 | 20.9 |
| Prostate adenocarcinoma 4 | 4.6 |
| Prostate cancer NAT 5 | 11.6 |
| Prostate adenocarcinoma 6 | 37.9 |
| Prostate adenocarcinoma 7 | 24.7 |
| Prostate adenocarcinoma 8 | 5.5 |
| Prostate adenocarcinoma 9 | 17.8 |
| Prostate cancer NAT 10 | 29.7 |
| Kidney cancer 1 | 8.7 |
| Kidney NAT 1 | 6.3 |
| Kidney cancer 2 | 82.4 |
| Kidney NAT 2 | 18.4 |
| Kidney cancer 3 | 7.3 |
| Kidney NAT 3 | 7.1 |
| Kidney cancer 4 | 8.5 |
| Kidney NAT 4 | 5.5 |

Column A - Rel. Exp. (%) Ag4020 Run 259744763

CNS_neurodegeneration_v1.0 Summary: Ag4020 The CG95430-01 gene was not differentially expressed in the Alzheimer's disease samples represented on this panel. However, this gene was expressed in the brain, with highest expression in the hippocampus of an Alzheimer's patient (CT=31.4). Therapeutic modulation of the activity of this gene or its protein product is useful in the treatment of neurological disorders, such as Alzheimer's disease, Parkinson's disease, schizophrenia, multiple sclerosis, stroke and epilepsy.
Oncology_cell_line_screening_panel_v3.1 Summary: Ag4020 Highest expression of the CG95430-01 gene was detected in an epidermoid carcinoma cell line (CT=32.6). Low expression of this gene was also seen in cell lines derived from fibrosarcoma, pancreatic ductal adenocarcinoma, pancreatic, colon and gastric cancers. Therapeutic modulation of the activity of this gene or its protein product is useful in the treatment of these cancers.
Panel 4.1D Summary: Ag4020 This gene was most highly expressed in a normal kidney sample (CT=32.3). Low but significant levels of expression were also seen in untreated and cytokine activated lung fibroblasts and thymus. These results suggest that this gene is involved in the homeostasis of the lung, thymus, and kidney. Down-regulated expression of this gene in cytokine-activated lung fibroblasts indicates that modulation of this gene and its protein product will help to maintain or restore function to the lung during inflammation.
Panel 5 Islet Summary: Ag4020 The CG95430-01 gene was expressed in adipose and skeletal muscle (CTs=31-34). This gene encodes a putative adiponectin [also known as adipocyte complement-related protein (ACRP-30), AdipoQ, apM1 (adipose most abundant transcript 1) or GBP28 (28 kDa gelatin binding protein)], a member of the Clq family. This protein is induced over 100-fold in adipocyte differentiation (Scherer et al., J Biol Chem Nov. 10, 1995;270(45):26746-9) and is involved in adipocyte signaling (Hu et al., J Biol Chem May 3, 1996;271(18):10697-703). Like other members of the Clq family, it forms a homotrimer and the crystal structure indicates that it likely arose from tumor necrosis factor (TNF; Shapiro and Scherer, Curr Biol Mar. 12, 1998;8(6):335-8). Ionomycin increases expression of adiponectin and dibutyryl cAMP and TNF-alpha reduce expression and secretion in 3T3-L1 adipocytes (Kappes and Loffler, Horm Metab Res 2000 November-December;32(11-12):548-54). Levels of adiponectin are decreased in obese humans (Arita et al., Biochem Biophys Res Commun 1999 April 2;257(1):79-83) and mice (Hu et al., J Biol Chem May 3, 1996;271(18):10697-703). A proteolytic cleavage product of adiponectin is reported to increase fatty acid oxidation in muscle and causes weight loss in mice. (Fruebis et al., Proc Natl Acad Sci USA Feb. 13, 2001;98(4):2005-10). A missense mutation in the protein was correlated with a markedly low plasma adiponectin level (Takahashi et al., Int J Obes Relat Metab Disord 2000 July;24(7):861-8). Recent papers have shown that adiponectin reverses insulin resistance in mouse models of lipoatrophy and obesity (Yamauchi et al., Nature Med 2000; 7(8): 941-6), and that it enhances insulin action on the liver (Berg et al., ibid, 947-53). In addition, circulating levels of adiponectin have been shown to be lower in obese than in lean subjects and lower in diabetic patients than in non-diabetic patients, with particularly low levels in subjects with coronary artery disease. Furthermore, in patients who were subjected to a weight loss program that resulted in a 10% reduction of their body mass index, circulating adiponectin levels increased significantly. (Berg AH. Trends Endocrinol Metab. 2002 March; 13(2):84-9). Based on the homology of CG95430-01 to adiponectin and its expression profile, therapeutic modulation of the activity of this gene or its protein product using nucleic acid, protein, antibody or small molecule drugs is useful for the treatment of obesity, type II diabetes and/or their secondary complications.

[0700] Adiponectin also seems to have additional cardiovascular and immune system effects. Levels of this protein are reduced in a cohort of Japanese patients with coronary artery disease (CAD), which correlates with the modulation of endothelial adhesion molecules on treatment of human aortic endothelial cells with adiponectin (Ouchi et al., Circulation Dec. 21-28, 1991; 100(25):2473-6). This protein is found adhering to vascular walls after injury (Okamoto et al. Horm Metab Res 2000 February; 32(2):47-50) and presence of adiponectin suppresses the macrophage to foam cell transformation (Ouchi et al., Circulation Feb. 27, 2001;103(8):1057-63). In addition, levels of adiponectin are lower in diabetic subjects with CAD relative to non-diabetic subjects or diabetic subjects without CAD (Hotta et al., Arterioscler Thromb Vasc Biol 2000 June; 20(6): 1595-9), indicating that lower levels of adiponectin may be an indicator of macroangiopathy in diabetes. Moreover, this protein negatively regulates the growth of myelomonocytic precursors (in part by inducing apoptosis) and macrophage function (Yokota et al., Blood Sep. 1, 2000;96(5):1723-32), potentially via the complement 1Q receptor ClqRp.

[0701] The Clq family of proteins includes the complement subunit Clq, gliacolin, Clq-related protein, cerebellin, CORS26 etc., all of which are secreted proteins. These proteins share a common domain, the Clq domain, at the C terminus and collagen triple helix repeats at the C terminus. The repeats enable the proteins to form homotrimers and possibly oligomers. Members of this family have been implicated in tissue differentiation, immune regulation, energy homeostasis, synaptic function and in diseases such as obesity and neurodegeneration. Therapeutic modulation of the activity of this gene or its protein product using nucleic acid, protein, antibody or small molecule drugs is useful in the prevention and/or treatment of obesity and diabetes. Furthermore, development of human monoclonal antibodies that inhibit this Adipo-Q like protein is useful in the therapeutic treatment of cachexia that occurs in many forms of cancer.

[0702] General oncology screening panel_v_{—}2.4 Summary: Ag4020 This gene was most highly expressed in a metastatic melanoma (CT=32.7). Significant levels of expression were also seen in a lung cancer and a kidney cancer when compared to normal adjacent tissue. Gene or protein expression levels are useful as a diagnostic marker to detect the presence of these cancers. Therapeutic modulation of the activity of this gene or its protein product is useful in the treatment of kidney cancer, lung cancer, and melanoma.

[0703] O.CG95430-02 and CG95430-04

[0704] Expression of genes CG95430-02 and CG95430-04 was assessed using the primer-probe set Ag7140, described in Table OA. Results of the RTQ-PCR runs are shown in Table OB. CG95430-02 and CG95430-04 represent the physical clones for mature and full-length gene respectively.

TABLE OA
Probe Name Ag7140

| | | | Start | SEQ ID |
|---|---|---|---|---|
| Primers | Sequences | Length | Position | No |
| Forward | 5′-tttctccaggaatgttca | 21 | 720 | 334 |
| | ggt-3′ | | | |
| Probe | TET-5′-actgcacaccaaag | 26 | 768 | 335 |
| | atgcttacatga-3′-TAMRA | | | |
| Reverse | 5′-cagaggcctggtcc | 17 | 798 | 336 |
| | tca-3′ | | | |

[0705] TABLE OB
General screening panel v1.7

| Tissue Name | A |
|---|---|
| Adipose | 100.0 |
| HUVEC | 0.0 |
| Melanoma* Hs688(A).T | 0.0 |
| Melanoma* Hs688(B).T | 0.0 |
| Melanoma (met) SK-MEL-5 | 0.0 |
| Testis | 0.0 |
| Prostate ca. (bone met) PC-3 | 0.0 |
| Prostate ca. DU145 | 0.0 |
| Prostate pool | 0.1 |
| Uterus pool | 1.3 |
| Ovarian ca. OVCAR-3 | 0.0 |
| Ovarian ca. (ascites) SK-OV-3 | 0.0 |
| Ovarian ca. OVCAR-4 | 0.0 |
| Ovarian ca. OVCAR-5 | 0.9 |
| Ovarian ca. IGROV-1 | 0.8 |
| Ovarian ca. OVCAR-8 | 0.0 |
| Ovary | 24.3 |
| Breast ca. MCF-7 | 0.0 |
| Breast ca. MDA-MB-231 | 0.0 |
| Breast ca. BT-549 | 0.0 |
| Breast ca. T47D | 0.0 |
| Breast pool | 0.1 |
| Trachea | 2.4 |
| Lung | 1.7 |
| Fetal Lung | 2.0 |
| Lung ca. NCI-N417 | 1.1 |
| Lung ca. LX-1 | 0.0 |
| Lung ca. NCI-H146 | 1.3 |
| Lung ca. SHP-77 | 0.0 |
| Lung ca. NCI-H23 | 0.0 |
| Lung ca. NCI-H460 | 0.0 |
| Lung ca. HOP-62 | 0.0 |
| Lung ca. NCI-H522 | 1.4 |
| Lung ca. DMS-114 | 0.0 |
| Liver | 0.1 |
| Fetal Liver | 0.0 |
| Kidney pool | 4.5 |
| Fetal Kidney | 2.7 |
| Renal ca. 786-0 | 0.0 |
| Renal ca. A498 | 0.0 |
| Renal ca. ACHN | 0.0 |
| Renal ca. UO-31 | 0.0 |
| Renal ca. TK-10 | 0.0 |
| Bladder | 15.5 |
| Gastric ca. (liver met.) NCI-N87 | 0.0 |
| Stomach | 0.8 |
| Colon ca. SW-948 | 0.2 |
| Colon ca. SW480 | 0.0 |
| Colon ca. (SW480 met) SW620 | 0.0 |
| Colon ca. HT29 | 0.0 |
| Colon ca. HCT-116 | 0.0 |
| Colon cancer tissue | 0.4 |
| Colon ca. SW1116 | 0.5 |
| Colon ca. Colo-205 | 0.0 |
| Colon ca. SW-48 | 0.0 |
| Colon | 1.8 |
| Small Intestine | 2.0 |
| Fetal Heart | 12.3 |
| Heart | 13.4 |
| Lymph Node pool 1 | 0.3 |
| Lymph Node pool 2 | 21.5 |
| Fetal Skeletal Muscle | 30.6 |
| Skeletal Muscle pool | 9.6 |
| Skeletal Muscle | 49.3 |
| Spleen | 1.5 |
| Thymus | 0.4 |
| CNS cancer (glio/astro) SF-268 | 0.0 |
| CNS cancer (glio/astro) T98G | 0.0 |
| CNS cancer (neuro; met) SK-N-AS | 0.0 |
| CNS cancer (astro) SF-539 | 0.0 |
| CNS cancer (astro) SNB-75 | 0.0 |
| CNS cancer (glio) SNB-19 | 0.0 |
| CNS cancer (glio) SF-295 | 0.0 |
| Brain (Amygdala) | 0.4 |
| Brain (Cerebellum) | 0.0 |
| Brain (Fetal) | 1.8 |
| Brain (Hippocampus) | 1.6 |
| Cerebral Cortex pool | 0.5 |
| Brain (Substantia nigra) | 0.2 |
| Brain (Thalamus) | 0.8 |
| Brain (Whole) | 0.7 |
| Spinal Cord | 0.2 |
| Adrenal Gland | 1.0 |
| Pituitary Gland | 0.0 |
| Salivary Gland | 0.8 |
| Thyroid | 2.5 |
| Pancreatic ca. PANC-1 | 0.6 |
| Pancreas pool | 0.0 |

Column A - Rel. Exp. (%) Ag7140, Run 318037557

General_screening_panel_v1.7 Summary: Ag7140 Highest expression of the CG95430-02 and CG95430-04 gene variants was detected in adipose tissue (CT=28.9). Moderate to low expression of these variants was also seen in number of tissues that contribute to metabolism including thyroid, skeletal muscle, heart, small intestine, and colon. Therapeutic modulation of the activity of these gene variants or their protein products using nucleic acid, protein, antibody or small molecule drugs is useful in the treatment of endocrine/metabolically related diseases, such as obesity and diabetes.

[0707] P. CG97111-01: Interleukin-1 Receptor Antagonist Protein Precursor

[0708] Expression of gene CG97111-01 was assessed using the primer-probe sets Ag4106 described in Tables PA. Results of the RTQ-PCR runs are shown in Tables PB and PC.

TABLE PA
Probe Name Ag4106

| | | | Start | SEQ ID |
|---|---|---|---|---|
| Primers | Sequences | Length | Position | No |
| Forward | 5′-cctctatagtctccggaa | 22 | 897 | 337 |
| | ggaa-3′ | | | |
| Probe | TET-5′-tggatttcagctca | 26 | 935 | 338 |
| | gtgacacccatt-3′-TAMRA | | | |
| Reverse | 5′-gttgtggaggtcagaagt | 22 | 961 | 339 |
| | ctga-3′ | | | |

[0709] TABLE PB
General screening panel v1.4

| Tissue Name | A |
|---|---|
| Adipose | 0.0 |
| Melanoma* Hs688(A).T | 0.0 |
| Melanoma* Hs688(B).T | 0.0 |
| Melanoma* M14 | 0.0 |
| Melanoma* LOXIMVI | 0.0 |
| Melanoma* SK-MEL-5 | 0.0 |
| Squamous cell carcinoma SCC-4 | 5.1 |
| Testis Pool | 0.0 |
| Prostate ca.* (bone met) PC-3 | 0.0 |
| Prostate Pool | 0.0 |
| Placenta | 0.0 |
| Uterus Pool | 0.0 |
| Ovarian ca. OVCAR-3 | 12.8 |
| Ovarian ca. SK-OV-3 | 0.0 |
| Ovarian ca. OVCAR-4 | 0.0 |
| Ovarian ca. OVCAR-5 | 0.0 |
| Ovarian ca. IGROV-1 | 0.0 |
| Ovarian ca. OVCAR-8 | 0.0 |
| Ovary | 0.0 |
| Breast ca. MCF-7 | 0.0 |
| Breast ca. MDA-MB-231 | 0.0 |
| Breast ca. BT 549 | 0.0 |
| Breast ca. T47D | 0.0 |
| Breast ca. MDA-N | 0.0 |
| Breast Pool | 0.0 |
| Trachea | 3.1 |
| Lung | 0.0 |
| Fetal Lung | 2.2 |
| Lung ca. NCI-N417 | 0.0 |
| Lung ca. LX-1 | 0.0 |
| Lung ca. NCI-H146 | 0.0 |
| Lung ca. SHP-77 | 0.0 |
| Lung ca. A549 | 0.0 |
| Lung ca. NCI-H526 | 0.0 |
| Lung ca. NCI-H23 | 0.0 |
| Lung ca. NCI-H460 | 0.0 |
| Lung ca. HOP-62 | 0.0 |
| Lung ca. NCI-H522 | 0.0 |
| Liver | 0.0 |
| Fetal Liver | 0.0 |
| Liver ca. HepG2 | 0.0 |
| Kidney Pool | 0.0 |
| Fetal Kidney | 0.0 |
| Renal ca. 786-0 | 0.0 |
| Renal ca. A498 | 0.0 |
| Renal ca. ACHN | 0.0 |
| Renal ca. UO-31 | 0.0 |
| Renal ca. TK-10 | 0.0 |
| Bladder | 0.0 |
| Gastric ca. (liver met.) NCI-N87 | 0.0 |
| Gastric ca. KATO III | 0.0 |
| Colon ca. SW-948 | 0.0 |
| Colon ca. SW480 | 0.0 |
| Colon ca.* (SW480 met) SW620 | 0.0 |
| Colon ca. HT29 | 0.0 |
| Colon ca. HCT-116 | 0.0 |
| Colon ca. CaCo-2 | 0.0 |
| Colon cancer tissue | 9.7 |
| Colon ca. SW1116 | 0.0 |
| Colon ca. Colo-205 | 0.0 |
| Colon ca. SW-48 | 0.0 |
| Colon Pool | 0.0 |
| Small Intestine Pool | 3.3 |
| Stomach Pool | 0.0 |
| Bone Marrow Pool | 0.0 |
| Fetal Heart | 0.0 |
| Heart Pool | 0.0 |
| Lymph Node Pool | 0.0 |
| Fetal Skeletal Muscle | 0.0 |
| Skeletal Muscle Pool | 0.0 |
| Spleen Pool | 0.0 |
| Thymus Pool | 100.0 |
| CNS cancer (glio/astro) U87-MG | 24.8 |
| CNS cancer (glio/astro) U-118-MG | 0.0 |
| CNS cancer (neuro; met) SK-N-AS | 0.0 |
| CNS cancer (astro) SF-539 | 0.0 |
| CNS cancer (astro) SNB-75 | 0.0 |
| CNS cancer (glio) SNB-19 | 0.0 |
| CNS cancer (glio) SF-295 | 0.0 |
| Brain (Amygdala) Pool | 0.0 |
| Brain (cerebellum) | 0.0 |
| Brain (fetal) | 0.0 |
| Brain (Hippocampus) Pool | 0.0 |
| Cerebral Cortex Pool | 0.0 |
| Brain (Substantia nigra) Pool | 5.7 |
| Brain (Thalamus) Pool | 0.0 |
| Brain (whole) | 0.0 |
| Spinal Cord Pool | 0.0 |
| Adrenal Gland | 0.0 |
| Pituitary gland Pool | 0.0 |
| Salivary Gland | 0.0 |
| Thyroid (female) | 0.0 |
| Pancreatic ca. CAPAN2 | 0.0 |
| Pancreas Pool | 0.0 |

Column A - Rel. Exp. (%) Ag4106, Run 219446784

[0710] TABLE PC
Panel 4.1D

| Tissue Name | A |
|---|---|
| Secondary Th1 act | 0.0 |
| Secondary Th2 act | 0.0 |
| Secondary Tr1 act | 0.0 |
| Secondary Th1 rest | 0.0 |
| Secondary Th2 rest | 0.0 |
| Secondary Tr1 rest | 0.0 |
| Primary Th1 act | 6.0 |
| Primary Th2 act | 0.0 |
| Primary Tr1 act | 0.0 |
| Primary Th1 rest | 0.0 |
| Primary Th2 rest | 0.0 |
| Primary Tr1 rest | 2.3 |
| CD45RA CD4 lymphocyte act | 0.0 |
| CD45RO CD4 lymphocyte act | 0.0 |
| CD8 lymphocyte act | 0.0 |
| Secondary CD8 lymphocyte rest | 0.0 |
| Secondary CD8 lymphocyte act | 0.0 |
| CD4 lymphocyte none | 0.0 |
| 2ry Th1/Th2/Tr1_anti-CD95 CH11 | 0.0 |
| LAK cells rest | 0.0 |
| LAK cells IL-2 | 0.0 |
| LAK cells IL-2 + IL-12 | 0.0 |
| LAK cells IL-2 + IFN gamma | 0.0 |
| LAK cells IL-2 + IL-18 | 0.0 |
| LAK cells PMA/ionomycin | 10.4 |
| NK Cells IL-2 rest | 0.0 |
| Two Way MLR 3 day | 5.2 |
| Two Way MLR 5 day | 0.0 |
| Two Way MLR 7 day | 0.0 |
| PBMC rest | 0.0 |
| PBMC PWM | 0.0 |
| PBMC PHA-L | 0.0 |
| Ramos (B cell) none | 0.0 |
| Ramos (B cell) ionomycin | 0.0 |
| B lymphocytes PWM | 5.0 |
| B lymphocytes CD40L and IL-4 | 0.0 |
| EOL-1 dbcAMP | 0.0 |
| EOL-1 dbcAMP PMA/ionomycin | 0.0 |
| Dendritic cells none | 0.0 |
| Dendritic cells LPS | 0.0 |
| Dendritic cells anti-CD40 | 0.0 |
| Monocytes rest | 0.0 |
| Monocytes LPS | 0.0 |
| Macrophages rest | 0.0 |
| Macrophages LPS | 0.0 |
| HUVEC none | 0.0 |
| HUVEC starved | 0.0 |
| HUVEC IL-1beta | 0.0 |
| HUVEC IFN gamma | 0.0 |
| HUVEC TNF alpha + IFN gamma | 0.0 |
| HUVEC TNF alpha + IL4 | 0.0 |
| HUVEC IL-11 | 0.0 |
| Lung Microvascular EC none | 0.0 |
| Lung Microvascular EC TNFalpha + IL-1beta | 0.0 |
| Microvascular Dermal EC none | 0.0 |
| Microsvasular Dermal EC TNFalpha + IL-1beta | 0.0 |
| Bronchial epithelium TNFalpha + IL1beta | 7.6 |
| Small airway epithelium none | 11.1 |
| Small airway epithelium TNFalpha + IL-1beta | 0.0 |
| Coronery artery SMC rest | 0.0 |
| Coronery artery SMC TNFalpha + IL-1beta | 0.0 |
| Astrocytes rest | 0.0 |
| Astrocytes TNFalpha + IL-1beta | 2.2 |
| KU-812 (Basophil) rest | 0.0 |
| KU-812 (Basophil) PMA/ionomycin | 0.0 |
| CCD1106 (Keratinocytes) none | 9.5 |
| CCD1106 (Keratinocytes) TNFalpha + IL-1beta | 0.0 |
| Liver cirrhosis | 5.3 |
| NCI-H292 none | 0.0 |
| NCI-H292 IL-4 | 0.0 |
| NCI-H292 IL-9 | 0.0 |
| NCI-H292 IL-13 | 0.0 |
| NCI-H292 IFN gamma | 0.0 |
| HPAEC none | 0.0 |
| HPAEC TNF alpha + IL-1 beta | 0.0 |
| Lung fibroblast none | 0.0 |
| Lung fibroblast TNF alpha + IL-1 beta | 0.0 |
| Lung fibroblast IL-4 | 0.0 |
| Lung fibroblast IL-9 | 0.0 |
| Lung fibroblast IL-13 | 0.0 |
| Lung fibroblast IFN gamma | 0.0 |
| Dermal fibroblast CCD1070 rest | 0.0 |
| Dermal fibroblast CCD1070 TNF alpha | 0.0 |
| Dermal fibroblast CCD1070 IL-1 beta | 0.0 |
| Dermal fibroblast IFN gamma | 0.0 |
| Dermal fibroblast IL-4 | 0.0 |
| Dermal Fibroblasts rest | 0.0 |
| Neutrophils TNFa + LPS | 0.0 |
| Neutrophils rest | 0.0 |
| Colon | 5.4 |
| Lung | 7.6 |
| Thymus | 9.3 |
| Kidney | 100.0 |

Column A - Rel. Exp. (%) Ag4106, Run 172569366

General_screening_panel_v1.4 Summary: Ag4106 Significant expression of the CG97111-01 gene was seen mainly in thymus (CT=33.4). This gene may therefore play an important role in T cell development. Gene or protein expression levels are useful for the detection of thymus. Therapeutic modulation of the activity of this gene or its protein product is useful to modulate immune function (T cell development) and be important for organ transplant, AIDS treatment or post chemotherapy immune reconstitiution.
Panel 4.1D Summary: Ag4106 Significant expression of this gene was seen in a normal kidney sample (CT=33.4). Therapeutic modulation of the activity of this gene or its protein product is useful to modulate kidney function and for the treatment of inflammatory or autoimmune diseases that affect the kidney, including lupus and glomerulonephritis.

### Other Embodiments

[0713] Although particular embodiments have been disclosed herein in detail, this has been done by way of example for purposes of illustration only, and is not intended to be limiting with respect to the scope of the appended claims, which follow. In particular, it is contemplated by the inventors that various substitutions, alterations, and modifications may be made to the invention without departing from the spirit and scope of the invention as defined by the claims. The choice of nucleic acid starting material, clone of interest, or library type is believed to be a matter of routine for a person of ordinary skill in the art with knowledge of the embodiments described herein. Other aspects, advantages, and modifications considered to be within the scope of the following claims. The claims presented are representative of the inventions disclosed herein. Other, unclaimed inventions are also contemplated. Applicants reserve the right to pursue such inventions in later claims.

1. An isolated polypeptide comprising the mature form of an amino acid sequenced selected from the group consisting of SEQ ID NO:2n, wherein n is an integer between 1 and 141.

2. An isolated polypeptide comprising an amino acid sequence selected from the group consisting of SEQ ID NO:2n, wherein n is an integer between 1 and 141.

3. An isolated polypeptide comprising an amino acid sequence which is at least 95% identical to an amino acid sequence selected from the group consisting of SEQ ID NO:2n, wherein n is an integer between 1 and 141.

4. An isolated polypeptide, wherein the polypeptide comprises an amino acid sequence comprising one or more conservative substitutions in the amino acid sequence selected from the group consisting of SEQ ID NO:2n, wherein n is an integer between 1 and 141.

5. The polypeptide of claim 1 wherein said polypeptide is naturally occurring.

6. A composition comprising the polypeptide of claim 1 and a carrier.

7. A kit comprising, in one or more containers, the composition of claim 6.

8. The use of a therapeutic in the manufacture of a medicament for treating a syndrome associated with a human disease, the disease selected from a pathology associated with the polypeptide of claim 1, wherein the therapeutic comprises the polypeptide of claim 1.

9. A method for determining the presence or amount of the polypeptide of claim 1 in a sample, the method comprising:
(a) providing said sample;
(b) introducing said sample to an antibody that binds immunospecifically to the polypeptide; and
(c) determining the presence or amount of antibody bound to said polypeptide,
thereby determining the presence or amount of polypeptide in said sample.

10. A method for determining the presence of or predisposition to a disease associated with altered levels of expression of the polypeptide of claim 1 in a first mammalian subject, the method comprising:
a) measuring the level of expression of the polypeptide in a sample from the first mammalian subject; and
b) comparing the expression of said polypeptide in the sample of step (a) to the expression of the polypeptide present in a control sample from a second mammalian subject known not to have, or not to be predisposed to, said disease,
wherein an alteration in the level of expression of the polypeptide in the first subject as compared to the control sample indicates the presence of or predisposition to said disease.

11. A method of identifying an agent that binds to the polypeptide of claim 1, the method comprising:
(a) introducing said polypeptide to said agent; and
(b) determining whether said agent binds to said polypeptide.

12. The method of claim 11 wherein the agent is a cellular receptor or a downstream effector.

13. A method for identifying a potential therapeutic agent for use in treatment of a pathology, wherein the pathology is related to aberrant expression or aberrant physiological interactions of the polypeptide of claim 1, the method comprising:
(a) providing a cell expressing the polypeptide of claim 1 and having a property or function ascribable to the polypeptide;
(b) contacting the cell with a composition comprising a candidate substance; and
(c) determining whether the substance alters the property or function ascribable to the polypeptide;
whereby, if an alteration observed in the presence of the substance is not observed when the cell is contacted with a composition in the absence of the substance, the substance is identified as a potential therapeutic agent.

14. A method for screening for a modulator of activity of or of latency or predisposition to a pathology associated with the polypeptide of claim 1, said method comprising:
(a) administering a test compound to a test animal at increased risk for a pathology associated with the polypeptide of claim 1, wherein said test animal recombinantly expresses the polypeptide of claim 1;
(b) measuring the activity of said polypeptide in said test animal after administering the compound of step (a); and
(c) comparing the activity of said polypeptide in said test animal with the activity of said polypeptide in a control animal not administered said polypeptide, wherein a change in the activity of said polypeptide in said test animal relative to said control animal indicates the test compound is a modulator activity of or latency or predisposition to, a pathology associated with the polypeptide of claim 1.

15. The method of claim 14, wherein said test animal is a recombinant test animal that expresses a test protein transgene or expresses said transgene under the control of a promoter at an increased level relative to a wild-type test animal, and wherein said promoter is not the native gene promoter of said transgene.

16. A method for modulating the activity of the polypeptide of claim 1, the method comprising contacting a cell sample expressing the polypeptide of claim 1 with a compound that binds to said polypeptide in an amount sufficient to modulate the activity of the polypeptide.

17. A method of treating or preventing a pathology associated with the polypeptide of claim 1, the method comprising administering the polypeptide of claim 1 to a subject in which such treatment or prevention is desired in an amount sufficient to treat or prevent the pathology in the subject.

18. The method of claim 17, wherein the subject is a human.

19. A method of treating a pathological state in a mammal, the method comprising administering to the mammal a polypeptide in an amount that is sufficient to alleviate the pathological state, wherein the polypeptide is a polypeptide having an amino acid sequence at least 95% identical to a polypeptide comprising the amino acid sequence selected from the group consisting of SEQ ID NO:2n, wherein n is an integer between 1 and 141, or a biologically active fragment thereof.

20. An isolated nucleic acid molecule comprising a nucleic acid sequence selected from the group consisting of SEQ ID NO:2n−1, wherein n is an integer between 1 and 141.

21. The nucleic acid molecule of claim 20, wherein the nucleic acid molecule is naturally occurring.

22. A nucleic acid molecule, wherein the nucleic acid molecule differs by a single nucleotide from a nucleic acid sequence selected from the group consisting of SEQ ID NO: 2n−1, wherein n is an integer between 1 and 141.

23. An isolated nucleic acid molecule encoding the mature form of a polypeptide having an amino acid sequence selected from the group consisting of SEQ ID NO:2n, wherein n is an integer between 1 and 141.

24. A composition comprising an isolated nucleic acid molecule, said molecule comprising a nucleic acid sequence selected from the group consisting of SEQ ID NO: 2n−1, wherein n is an integer between 1 and 141, and a carrier.

25. The nucleic acid molecule of claim 20, wherein said nucleic acid molecule hybridizes under stringent conditions to the nucleotide sequence selected from the group consisting of SEQ ID NO: 2n−1, wherein n is an integer between 1 and 141, or a complement of said nucleotide sequence.

26. A vector comprising the nucleic acid molecule of claim 20.

27. The vector of claim 26, further comprising a promoter operably linked to said nucleic acid molecule.

28. A cell comprising the vector of claim 26.

29. An antibody that immunospecifically binds to the polypeptide of claim 1.

30. The antibody of claim 29, wherein the antibody is a monoclonal antibody.

31. The antibody of claim 29, wherein the antibody is a humanized antibody.

32. A method for determining the presence or amount of the nucleic acid molecule of claim 20 in a sample, the method comprising:
(a) providing said sample;
(b) introducing said sample to a probe that binds to said nucleic acid molecule; and
(c) determining the presence or amount of said probe bound to said nucleic acid molecule,
thereby determining the presence or amount of the nucleic acid molecule in said sample.

33. The method of claim 32 wherein presence or amount of the nucleic acid molecule is used as a marker for cell or tissue type.

34. The method of claim 33 wherein the cell or tissue type is cancerous.

35. A method for determining the presence of or predisposition to a disease associated with altered levels of expression of the nucleic acid molecule of claim 20 in a first mammalian subject, the method comprising:
a) measuring the level of expression of the nucleic acid in a sample from the first mammalian subject; and
b) comparing the level of expression of said nucleic acid in the sample of step (a) to the level of expression of the nucleic acid present in a control sample from a second mammalian subject known not to have or not be predisposed to, the disease;
wherein an alteration in the level of expression of the nucleic acid in the first subject as compared to the control sample indicates the presence of or predisposition to the disease.

36. A method of producing the polypeptide of claim 1, the method comprising culturing a cell under conditions that lead to expression of the polypeptide, wherein said cell comprises a vector comprising an isolated nucleic acid molecule comprising a nucleic acid sequence selected from the group consisting of SEQ ID NO:2n−1, wherein n is an integer between 1 and 141.

37. The method of claim 36 wherein the cell is a bacterial cell.

38. The method of claim 36 wherein the cell is an insect cell.

39. The method of claim 36 wherein the cell is a yeast cell.

40. The method of claim 36 wherein the cell is a mammalian cell.

41. A method of producing the polypeptide of claim 2, the method comprising culturing a cell under conditions that lead to expression of the polypeptide, wherein said cell comprises a vector comprising an isolated nucleic acid molecule comprising a nucleic acid sequence selected from the group consisting of SEQ ID NO:2n−1, wherein n is an integer between 1 and 141.

42. The method of claim 41 wherein the cell is a bacterial cell.

43. The method of claim 41 wherein the cell is an insect cell.

44. The method of claim 41 wherein the cell is a yeast cell.

45. The method of claim 41 wherein the cell is a mammalian cell.

46. An isolated polypeptide comprising an amino acid sequence at least 95% similar to SEQ ID NO: 2, wherein said amino acid sequence comprises at least one amino acid substitution, wherein said substitution is at amino acid position 43 when numbered in accordance with SEQ ID NO: 2.

47. An isolated nucleic acid molecule comprising an nucleic acid sequence at least 95% similar to SEQ ID NO: 1, wherein said nucleic acid sequence comprises at least one nucleic acid substitution, wherein said substitution is at nucleic acid position 135 when numbered in accordance with SEQ ID NO: 1.

48. An isolated polypeptide comprising an amino acid sequence at least 95% similar to SEQ ID NO: 14, wherein said amino acid sequence comprises at least one amino acid substitution, wherein said substitution is at the amino acid position selected from the group consisting of 8, 54, 56, 92, 207, 240, 706, 891 and 923 when numbered in accordance with SEQ ID NO: 14.

49. An isolated nucleic acid molecule comprising an nucleic acid sequence at least 95% similar to SEQ ID NO: 13, wherein said nucleic acid sequence comprises at least one nucleic acid substitution, wherein said substitution is at the nucleic acid position selected from the group consisting of 272, 410, 416, 523, 869, 967, 2366, 2921 and 3018 when numbered in accordance with SEQ ID NO: 13.

50. An isolated polypeptide comprising an amino acid sequence at least 95% similar to SEQ ID NO: 58, wherein said amino acid sequence comprises at least one amino acid substitution, wherein said substitution is at the amino acid position selected from the group consisting of 23, 56, 105, 125, 160, 183 and 215 when numbered in accordance with SEQ ID NO: 58.

51. An isolated nucleic acid molecule comprising an nucleic acid sequence at least 95% similar to SEQ ID NO: 57, wherein said nucleic acid sequence comprises at least one nucleic acid substitution, wherein said substitution is at the nucleic acid position selected from the group consisting of 181, 278, 426, 485, 591, 661 and 756 when numbered in accordance with SEQ ID NO: 57.

52. An isolated polypeptide comprising an amino acid sequence at least 95% similar to SEQ ID NO: 80, wherein said amino acid sequence comprises at least one amino acid substitution, wherein said substitution is at amino acid position 219 when numbered in accordance with SEQ ID NO: 80.

53. An isolated nucleic acid molecule comprising an nucleic acid sequence at least 95% similar to SEQ ID NO: 79, wherein said nucleic acid sequence comprises at least one nucleic acid substitution, wherein said substitution is at nucleic acid position 685 when numbered in accordance with SEQ ID NO: 79.

54. An isolated polypeptide comprising an amino acid sequence at least 95% similar to SEQ ID NO: 92, wherein said amino acid sequence comprises at least one amino acid substitution, wherein said substitution is at amino acid position 470 when numbered in accordance with SEQ ID NO: 92.

55. An isolated nucleic acid molecule comprising an nucleic acid sequence at least 95% similar to SEQ ID NO: 91, wherein said nucleic acid sequence comprises at least one nucleic acid substitution, wherein said substitution is at nucleic acid position 1874 when numbered in accordance with SEQ ID NO: 91.

56. An isolated polypeptide comprising an amino acid sequence at least 95% similar to SEQ ID NO: 100, wherein said amino acid sequence comprises at least one amino acid substitution, wherein said substitution is at the amino acid position selected from the group consisting of 11, 112 and 145 when numbered in accordance with SEQ ID NO: 100.

57. An isolated nucleic acid molecule comprising an nucleic acid sequence at least 95% similar to SEQ ID NO: 99, wherein said nucleic acid sequence comprises at least one nucleic acid substitution, wherein said substitution is at the nucleic acid position selected from the group consisting of 80, 383 and 482 when numbered in accordance with SEQ ID NO: 99.

58. An isolated polypeptide comprising an amino acid sequence at least 95% similar to SEQ ID NO: 122, wherein said amino acid sequence comprises at least one amino acid substitution, wherein said substitution is at the amino acid position selected from the group consisting of 12, 38, 54, 65, 66, 69, 80, 90, 91, 96, 100, 101, 102, 114, 122, 125, 126, 134, 135, 144, 148, 154, 155 and 156 when numbered in accordance with SEQ ID NO: 122.

59. An isolated nucleic acid molecule comprising an nucleic acid sequence at least 95% similar to SEQ ID NO: 121, wherein said nucleic acid sequence comprises at least one nucleic acid substitution, wherein said substitution is at the nucleic acid position selected from the group consisting of 35, 112, 160, 194, 197, 206, 240, 269, 273, 287, 298, 301, 305, 340, 365, 374, 376, 400, 404, 431, 442, 461, 463 and 468 when numbered in accordance with SEQ ID NO: 121.

The application's sequence listing, which the Patent Office published only in electronic form, follows.

SEQUENCE LISTING (339 sequences)

SEQ ID NO: 1 - DNA, 2414 bp, Homo sapiens
  CDS (1)..(2400)
atggccccctcggcctgggccatttgctggctgctagggggcctcctgctccatgggggtagctctggccccagccccggccccagtgtgccccgcctgcggctctcctaccgaggagccgtggtccgaaagccttccagcaccatgtggatggaaacattttccagatacctcctgtctgccaaccgctctgccatctttctgggcccccagggctccctgaacctccaggccatgtacctagatgagtaccgagaccgcctctttctgggtggcctggacgccctctactctctgcggctggaccaggcatggccagatccccgggaggtcctgtggccaccgcagccaggacagagggaggagtgtgttcgaaagggaagagatcctttgacagagtgcgccaacttcgtgcgggtgctacagcctcacaaccggacccacctgctagcctgtggcactggggccttccagcccacctgtgccctcatcacagttggccaccgtggggagcatgtgctccacctggagcctggcagtgtggaaagtggccgggggcggtgccctcacgagcccagccgtccctttgccagcaccttcatagacggggagctgtacacgggtctcactgctgacttcctggggcgagaggccatgatcttccgaagtggaggtcctcggccagctctgcgttccgactctgaccagagtctcttgcacgacccccggtttgtgatggccgcccggatccctgagaactctgaccaggacaatgacaaggtgtacttcttcttctcggagacggtcccctcgcccgatggtggctcgaaccatgtcactgtcagccgcgtgggccgcgtctgcgtgaatgatgctgggggccagcgggtgctggtgaacaaatggagcactttcctcaaggccaggctggtctgctcggtgcccggccctggtggtgccgagacccactttgaccagctagaggatgtgttcctgctgtggcccaaggccgggaagagcctcgaggtgtacgcgctgttcagcaccgtcagtgccgtgttccagggcttcgccgtctgtgtgtaccacatggcagacatctgggaggttttcaacgggccctttgcccaccgagatgggcctcagcaccagtgggggccctatgggggcaaggtgcccttccctcgccctggcgtgtgccccagcaagatgaccgcacagccaggacggccttttggcagcaccaaggactacccagatgaggtgctgcagtttgcccgagcccaccccctcatgttctggcctgtgcggcctcgacatggccgccctgtccttgtcaagacccacctggcccagcagctacaccagatcgtggtggaccgcgtggaggcagaggatgggacctacgatgtcattttcctggggactgactcagggtctgtgctcaaagtcatcgctctccaggcagggggctcagctgaacctgaggaagtggttctggaggagctccaggtgtttaaggtgccaacacctatcaccgaaatggagatctctgtcaaaaggcaaatgctatacgtgggctctcggctgggtgtggcccagctgcggctgcaccaatgtgagacttacggcactgcctgtgcagagtgctgcctggcccgggacccatactgtgcctgggatggtgcctcctgtacccactaccgccccagccttggcaagcgccggttccgccggcaggacatccggcacggcaaccctgccctgcagtgcctgggccagagccaggaagaagaggcagtgggacttgtggcagccaccatggtctacggcacggagcacaatagcaccttcctggagtgcctgcccaagtctccccaggctgctgtgcgctggctcttgcagaggccaggggatgaggggcctgaccaggtgaagacggacgagcgagtcttgcacacggagcgggggctgctgttccgcaggcttagccgtttcgatgcgggcacctacacctgcaccactctggagcatggcttctcccagactgtggtccgcctggctctggtggtgattgtggcctcacagctggacaacctgttccctccggagccaaagccagaggagcccccagcccggggaggcctggcttccaccccacccaaggcctggtacaaggacatcctgcagctcattggcttcgccaacctgccccgggtggatgagtactgtgagcgcgtgtggtgcaggggcaccacggaatgctcaggctgcttccggagccggagccggggcaagcaggccaggggcaagagctgggcagggctggagctaggcaagaagatgaagagccgggtgcatgccgagcacaatcggacgccccgggaggtggaggccacgtagaagggggcaga

SEQ ID NO: 2 - protein, 800 aa, Homo sapiens
MAPSAWAICWLLGGLLLHGGSSGPSPGPSVPRLRLSYRGAVVRKPSSTMWMETFSRYLLSANRSAIFLGPQGSLNLQAMYLDEYRDRLFLGGLDALYSLRLDQAWPDPREVLWPPQPGQREECVRKGRDPLTECANFVRVLQPHNRTHLLACGTGAFQPTCALITVGHRGEHVLHLEPGSVESGRGRCPHEPSRPFASTFIDGELYTGLTADFLGREAMIFRSGGPRPALRSDSDQSLLHDPRFVMAARIPENSDQDNDKVYFFFSETVPSPDGGSNHVTVSRVGRVCVNDAGGQRVLVNKWSTFLKARLVCSVPGPGGAETHFDQLEDVFLLWPKAGKSLEVYALFSTVSAVFQGFAVCVYHMADIWEVFNGPFAHRDGPQHQWGPYGGKVPFPRPGVCPSKMTAQPGRPFGSTKDYPDEVLQFARAHPLMFWPVRPRHGRPVLVKTHLAQQLHQIVVDRVEAEDGTYDVIFLGTDSGSVLKVIALQAGGSAEPEEVVLEELQVFKVPTPITEMEISVKRQMLYVGSRLGVAQLRLHQCETYGTACAECCLARDPYCAWDGASCTHYRPSLGKRRFRRQDIRHGNPALQCLGQSQEEEAVGLVAATMVYGTEHNSTFLECLPKSPQAAVRWLLQRPGDEGPDQVKTDERVLHTERGLLFRRLSRFDAGTYTCTTLEHGFSQTVVRLALVVIVASQLDNLFPPEPKPEEPPARGGLASTPPKAWYKDILQLIGFANLPRVDEYCERVWCRGTTECSGCFRSRSRGKQARGKSWAGLELGKKMKSRVHAEHNRTPREVEAT

SEQ ID NO: 3 - DNA, 4700 bp, Homo sapiens
  CDS (1)..(2346)
atggccccctcggcctgggccatttgctggctgctagggggcctcctgctccatgggggtagctctggccccagccccggccccagtgtgccccgcctgcggctctcctaccgagacctcctgtctgccaaccgctctgccatctttctgggcccccagggctccctgaacctccaggccatgtacctagatgagtaccgagaccgcctctttctgggtggcctggacgccctctactctctgcggctggaccaggcatggccagatccccgggaggtcctgtggccaccgcagccaggacagagggaggagtgtgttcgaaagggaagagatcctttgacagagtgcgccaacttcgtgcgggtgctacagcctcacaaccggacccacctgctagcctgtggcactggggccttccagcccacctgtgccctcatcacagttggccaccgtggggagcatgtgctccacctggagcctggcagtgtggaaagtggccgggggcggtgccctcacgagcccagccgtccctttgccagcaccttcatagacggggagctgtacacgggtctcactgctgacttcctggggcgagaggccatgatcttccgaagtggaggtcctcggccagctctgcgttccgactctgaccagagtctcttgcacgacccccggtttgtgatggccgcccggatccctgagaactctgaccaggacaatgacaaggtgtacttcttcttctcggagacggtcccctcgcccgatggtggctcgaaccatgtcactgtcagccgcgtgggccgcgtctgcgtgaatgatgctgggggccagcgggtgctggtgaacaaatggagcactttcctcaaggccaggctggtctgctcggtgcccggccctggtggtgccgagacccactttgaccagctagaggatgtgttcctgctgtggcccaaggccgggaagagcctcgaggtgtacgcgctgttcagcaccgtcagtgccgtgttccagggcttcgccgtctgtgtgtaccacatggcagacatctgggaggttttcaacgggccctttgcccaccgagatgggcctcagcaccagtgggggccctatgggggcaaggtgcccttccctcgccctggcgtgtgccccagcaagatgaccgcacagccaggacggccttttggcagcaccaaggactacccagatgaggtgctgcagtttgcccgagcccaccccctcatgttctggcctgtgcggcctcgacatggccgccctgtccttgtcaagacccacctggcccagcagctacaccagatcgtggtggaccgcgtggaggcagaggatgggacctacgatgtcattttcctggggactgactcagggtctgtgctcaaagtcatcgctctccaggcagggggctcagctgaacctgaggaagtggttctggaggagctccaggtgtttaaggtgccaacacctatcaccgaaatggagatctctgtcaaaaggcaaatgctatacgtgggctctcggctgggtgtggcccagctgcggctgcaccaatgtgagacttacggcactgcctgtgcagagtgctgcctggcccgggacccatactgtgcctgggatggtgcctcctgtacccactaccgccccagccttggcaagcgccggttccgccggcaggacatccggcacggcaaccctgccctgcagtgcctgggccagagccaggaagaagaggcagtgggacttgtggcagccaccatggtctacggcacggagcacaatagcaccttcctggagtgcctgcccaagtctccccaggctgctgtgcgctggctcttgcagaggccaggggatgaggggcctgaccaggtgaagacggacgagcgagtcttgcacacggagcgggggctgctgttccgcaggcttagccgtttcgatgcgggcacctacacctgcaccactctggagcatggcttctcccagactgtggtccgcctggctctggtggtgattgtggcctcacagctggacaacctgttccctccggagccaaagccagaggagcccccagcccggggaggcctggcttccaccccacccaaggcctggtacaaggacatcctgcagctcattggcttcgccaacctgccccgggtggatgagtactgtgagcgcgtgtggtgcaggggcaccacggaatgctcaggctgcttccggagccggagccggggcaagcaggccaggggcaagagctgggcagggctggagctaggcaagaagatgaagagccgggtgcatgccgagcacaatcggacgccccgggaggtggaggccacgtagaagggggcagaggaggggtggtcaggatgggctggggggcccactagcagcccccagcatctcccacccacccagctagggcagaggggtcaggatgtctgtttgcctcttagagacaggtgtctctgcccccacaccgctactggggtctaatggaggggctgggttcttgaagcctgttccctgcccttctctgtgctcttagacccagctggagccagcaccctctggctgctggcagccccaagggatctgccatttgttctcagagatggcctggcttccgcaacacatttccgggtgtgcccagaggcaagagggttgggtggttctttcccagcctacagaacaatggccattctgagtgaccctcagagtgggtgtgtgggtgcgtctagggggtatcccggtagggggcctgcagggagccagagggtggaaatggcctctaagctagcaccccgtaagaagagcctacctgaccgacttggggagggaacacagaggtgttgggaaggtggagcaacaatgcacctcccctcctgtcgcgccgtgatatcttggtggctccctgccactgcccaccgcctcttctccatctgagaatcacggagaggtgtagataatctagaggcatagactgctagagcccccagggatctggggtggtcagggctcaggcttcactttgtaaaccaggtgggggcatctcacagcctgacttcccttccccaggccagggttgctgggatgcctgcccctcctgagaggaccccctccccattgtcaggctctccatgtccacgagcggggaggggtgggttctggggcattgttgtcccttgtgtctgtggactagagatagggtgggggagctggggaagggtgcaggcgggaagagtgggctgtctttcccagggtgatgcaagcatgccgcagccctggaggctgggaatgtggaggctctgtgagccctgcagccctcagaatcagggccagggatgcagaagattgagaggatatggagatggatagagggcaggagacccttaggatagattgtgggacccaggcaggaacaggtgtccacaagaactcaggatggcatcagttagctcagaagccacctggaagacccagtgtttccatctctggaatctctgttttatgctaaatggatttaggaagactgtttttcttttaagggggaaacaaggtagagaaaaggacgaagaagtgtaagtcccgctgattctcgggggtaaggctcggatggcaaggacgcgttctgcctgggcatgtaggggaggtgtttttgccatcaccagtttctcaggctggggagcacagaggggaggaggaggactaaatgaaaagttgttcccagcctgcacatgaacacattcatgacacacaaaactggctggaaggagataagagcactgggtttgagattccctccattaaaacaaccaagacaaagaaaggaggggaaaaaaagataaaaagcaagccagggttccctgccctattgaaactcaaacccagactgccttgggttttatctttcccttacccctggcacctccagagaactgggacctgaaatagtccctccgttctcccctttgaccatgtaataaatgaaccagaagcactgagattaacctatcaacgccctgagaagccttccagcctgcggtgctgtctgctgggaggtcagctggtcaaggcagaggaggagaggaggaaaggatgggggctgaagagcagaagggaggggagacagaggggattaaagaggggaggagagagtgcagagctccaggaaagggtatcagagctgcagccagctctgccctctaccctagggaggccagaaagacacaaacagccctccgggcctttacgctggactctggcttggcaggctccaggcagggtcctctgggaagttactctagaaaacgaagggaggaggagcacaagatcctcagcaacgaacacctgcacttagaaaaagtggacagcttctgccaaccacaccctacccatggtactgtatgctattaactcctggaaacgccccgtaaatgcgagttgtttttgtatttgtgtgttgagatgggccttgtggtttctctgtactcagagcacatttcttgtaattactattgttatttttattgtcatgactgcccctgagctctggtgagaaaagctgaatttacaaggaaagggatgaagttaatatttgcatcacataattatatcattactgtgtatctgtgtattgtactaaatggactgatgctgcgcacatgagctgaaaatgaagagccctcccatcc

SEQ ID NO: 4 - protein, 782 aa, Homo sapiens
MAPSAWAICWLLGGLLLHGGSSGPSPGPSVPRLRLSYRDLLSANRSAIFLGPQGSLNLQAMYLDEYRDRLFLGGLDALYSLRLDQAWPDPREVLWPPQPGQREECVRKGRDPLTECANFVRVLQPHNRTHLLACGTGAFQPTCALITVGHRGEHVLHLEPGSVESGRGRCPHEPSRPFASTFIDGELYTGLTADFLGREAMIFRSGGPRPALRSDSDQSLLHDPRFVMAARIPENSDQDNDKVYFFFSETVPSPDGGSNHVTVSRVGRVCVNDAGGQRVLVNKWSTFLKARLVCSVPGPGGAETHFDQLEDVFLLWPKAGKSLEVYALFSTVSAVFQGFAVCVYHMADIWEVFNGPFAHRDGPQHQWGPYGGKVPFPRPGVCPSKMTAQPGRPFGSTKDYPDEVLQFARAHPLMFWPVRPRHGRPVLVKTHLAQQLHQIVVDRVEAEDGTYDVIFLGTDSGSVLKVIALQAGGSAEPEEVVLEELQVFKVPTPITEMEISVKRQMLYVGSRLGVAQLRLHQCETYGTACAECCLARDPYCAWDGASCTHYRPSLGKRRFRRQDIRHGNPALQCLGQSQEEEAVGLVAATMVYGTEHNSTFLECLPKSPQAAVRWLLQRPGDEGPDQVKTDERVLHTERGLLFRRLSRFDAGTYTCTTLEHGFSQTVVRLALVVIVASQLDNLFPPEPKPEEPPARGGLASTPPKAWYKDILQLIGFANLPRVDEYCERVWCRGTTECSGCFRSRSRGKQARGKSWAGLELGKKMKSRVHAEHNRTPREVEAT

SEQ ID NO: 5 - DNA, 6408 bp, Homo sapiens
  CDS (1400)..(5455)
cctgggactctgggagaatggtccagagctcattgtccttgttgataaaatgatagatttggactcaatatcccatgctgcctcttccaacttgatttttaccccagactgggctaccagactggtatgcccacacatgcccgtttcctttcttttcttctctgcatctctgcctttgtgtccagagcgtgttttccctttgcaagtttctctccattctgcacattatgagtttcagcatttctgttgccctagaaagtctatctttgagatcttgcactgtttctctttttacagtgtctcataaactcccttcttggattcagaaccaccctttctttcccattatcctgtcaaactgcttcttgccatggtccaggggtaggaggatggcaggcaggaggtgcttctctggggctcttagtgtctcaattcttctgctttatctgggttttcctttacccagaattttattatgtaaaatgcttcactcagactttgttctaattatccaatttttggcatactctagaaagtcttttgatattttccttcctccaacttatctatttttatttcatagttctctttggttatctcttagaatcacactttcctggttttaatttttcaaatcctttgtctttctcactcgttcttaggtcacctttttttacattttcaaatatattttttgttcagcagagggctcccttcccatccctcttgcagcccgggcagctaggatttgaagcttgccccttgaatctttctctcccgccttctagccatcagaaacactagatcacttaaacttgtaaacaattcggcctcgctccttgtgattgcgctaaaccttccgtcctcagctgagaacgctccaccacctccccggatcgctcatctcttggctgccctcccactgttcctgatgttattttactccccgtatcccctactcgttcttcacaattctgtagggtgcgtattactaaccccagtttacagctgaggaaactgaggcttggagaggttcgctcggtatcgtacagtttgcaaggttaaccctaatccggccagttctggctttccagcccagcccagcagcctagcctccctctctgccgctgcaggttataacggctctcccccgttttacacgaggtcccttccccttcaaatccacaggcaggaagatcgttccgaactgacggggctggggaatgtgggagtccggagtggggtttgggggagcttcctcaggccctgagtgttggggtgggcaggccgcgccgatggccctcggggatgtcacattcgagatggggtgaccgagaacggcaaggcgggatgtggcaaacggcggcaagtgctcggagtcctaggtcttgccgccggaatgccggccggggaaggggcttcggcccaccgggctggtcaccacactcggcaggcccggggcgggagtcggccgagcagccgcgggatgcagggcgccccctcgcgctcctccgcgcgcctcgaggctggcgggtgcagcgcccgccgcggcaggtctgctccagccccctcctctttttcgctcccgctcccctccttctctccctttgcttgcaactcctcccccaccgccccctccctccttctgctcccgcggtctcctcctccctgctctctccgagcgccgggtcgggagctagttggagcgcgggggttggtgccagagcccagctccgccgagccgggcgggtcggcagcgcatccagcggctgctgggagcccgagcgcagcgggcgcgggcccgggtggggactgcaccggagcgctgagagctggaggccgttcctgcgcggccgccccattcccagaccggccgccagcccatctggttagctcccgccgctccgcgccgcccgggagtcgggagccgcggggaaccgggcacctgcacccgcctctgggagtgagtggttccagctggtgcctggcctgtgtctcttggatgccctgtggcttcagtccgtctcctgttgcccaccacctcgtccctgggccgcctgataccccagcccaacagctaaggtgtggatggacagtagggggctggcttctctcactggtcaggggtcttctcccctgtctgcctcccggagctaggactgcagaggggcctatcatggtgcttgcaggccccctggctgtctcgctgttgctgcccagcctcacactgctggtgtcccacctctccagctcccaggatgtctccagtgagcccagcagtgagcagcagctgtgcgcccttagcaagcaccccaccgtggcctttgaagacctgcagccgtgggtctctaacttcacctaccctggagcccgggatttctcccagctggctttggacccctccgggaaccagctcatcgtgggagccaggaactacctcttcagactcagccttgccaatgtctctcttcttcaggccacagagtgggcctccagtgaggacacgcgccgctcctgccaaagcaaagggaagactgaggaggagtgtcagaactacgtgcgagtcctgatcgtcgccggccggaaggtgttcatgtgtggaaccaatgccttttcccccatgtgcaccagcagacaggtggggaacctcagccggactactgagaagatcaatggtgtggcccgctgcccctatgacccacgccacaactccacagctgtcatctcctcccagggggagctctatgcagccacggtcatcgacttctcaggtcgggaccctgccatctaccgcagcctgggcagtgggccaccgcttcgcactgcccaatataactccaagtggcttaatgagccaaacttcgtggcagcctatgatattgggctgtttgcatacttcttcctgcgggagaacgcagtggagcacgactgtggacgcaccgtgtactctcgcgtggcccgcgtgtgcaagaatgacgtggggggccgattcctgctggaggacacatggaccacattcatgaaggcccggctcaactgctcccgcccgggcgaggtccccttctactataacgagctgcagagtgccttccacttgccagagcaggacctcatctatggagttttcacaaccaacgtaaacagcatcgcggcttctgctgtctgcgccttcaacctcagtgctatctcccaggctttcaatggcccatttcgctaccaggagaaccccagggctgcctggctccccatagccaaccccatccccaatttccagtgtggcaccctgcctgagaccggtcccaacgagaacctgacggagcgcagcctgcaggacgcgcagcgcctcttcctgatgagcgaggccgtgcagccggtgacacccgagccctgtgtcacccaggacagcgtgcgcttctcacacctcgtggtggacctggtgcaggctaaagacacgctctaccatgtactctacattggcaccgagtcgggcaccatcctgaaggcgctgtccacggcgagccgcagcctccacggctgctacctggaggagctgcacgtgctgccccccgggcgccgcgagcccctgcgcagcctgcgcatcctgcacagcgcccgcgcgctcttcgtggggctgagagacggcgtcctgcgggtcccactggagaggtgcgccgcctaccgcagccagggggcatgcctgggggcccgggacccgtactgtggctgggacgggaagcagcaacgttgcagcacactcgaggacagctccaacatgagcctctggacccagaacatcaccgcctgtcctgtgcggaatgtgacacgggatgggggcttcggcccatggtcaccatggcaaccatgtgagcacttggatggggacaactcaggctcttgcctgtgtcgagctcgatcctgtgattcccctcgaccccgctgtgggggccttgactgcctggggccagccatccacatcgccaactgctccaggaatggggcgtggaccccgtggtcatcgtgggcgctgtgcagcacgtcctgtggcatcggcttccaggtccgccagcgaagttgcagcaaccctgctccccgccacgggggccgcatctgcgtgggcaagagccgggaggaacggttctgtaatgagaacacgccttgcccggtgcccatcttctgggcttcctggggctcctggagcaagtgcagcagcaactgtggagggggcatgcagtcgcggcgtcgggcctgcgagaacggcaactcctgcctgggctgcggcgtggagttcaagacgtgcaaccccgagggctgccccgaagtgcggcgcaacaccccctggacgccgtggctgcccgtgaacgtgacgcagggcggggcacggcaggagcagcggttccgcttcacctgccgcgcgccccttgcagacccgcacggcctgcagttcggcaggagaaggaccgagacgaggacctgtcccgcggacggctccggctcctgcgacaccgacgccctggtggaggacctcctgcgcagcgggagcacctccccgcacacggtgagcgggggctgggccgcctggggcccgtggtcgtcctgctcccgggactgcgagctgggcttccgcgtccgcaagagaacgtgcactaacccggagccccgcaacgggggcctgccctgcgtgggcgatgctgccgagtaccaggactgcaacccccaggcttgcccagttcggggtgcttggtcctgctggacctcatggtctccatgctcagcttcctgtggtgggggtcactatcaacgcacccgttcctgcaccagccccgcaccctccccaggtgaggacatctgtctcgggctgcacacggaggaggcactatgtgccacacaggcctgcccagaaggctggtcgccctggtctgagtggagtaagtgcactgacgacggagcccagagccgaagccggcactgtgaggagctcctcccagggtccagcgcctgtgctggaaacagcagccagagccgcccctgcccctacagcgagattcccgtcatcctgccagcctccagcatggaggaggccaccggctgtgcagggttcaatctcatccacttggtggccacgggcatctcctgcttcttgggctctgggctcctgaccctagcagtgtacctgtcttgccagcactgccagcgtcagtcccaggagtccacactggtccatcctgccacccccaaccatttgcactacaagggcggaggcaccccgaagaatgaaaagtacacacccatggaattcaagaccctgaacaagaataacttgatccctgatgacagagccaacttctacccattgcagcagaccaatgtgtacacgactacttactacccaagccccctgaacaaacacagcttccggcccgaggcctcacctggacaacggtgcttccccaacagctgataccgccgtcctggggacttgggcttcttgccttcataaggcacagagcagatggagatgggacagtggagccagtttggttttctccctctgcactaggccaagaacttgctgccttgcctgtggggggtcccatccggcttcagagagctctggctggcattgaccatgggggaaagggctggtttcaggctgacatatggccgcaggtccagttcagcccaggtctctcatggttatcttccaacccactgtcacgctgacactatgctgccatgcctgggctgtggacctactgggcatttgaggaactggagaatggagatggcaagagggcaggcttttaagtttgggttggagacaacttcctgtggcccccacaagctgagtctggccttctccagctggccccaaaaaaggcctttgctacatcctgattatctctgaaagtaatcaatcaagtggctccagtagctctggattttctgccagggctgggccattgtggtgctgccccagtatgacatgggaccaaggccagcgcaggttatccacctctgcctggaagtctatactctacccagggcatccctctggtcagaggcagtgagtactgggaactggaggctgacctgtgcttagaagtcctttaatctgggctggtacaggcctcagccttgccctcaatgcacgaaaggtggcccaggagagaggatcaatgccacaggaggcagaagtctggcctctgtgcctctatggagactatcttccagttgctgctcaacagagttgttggctgagacctgcttgggagtctctgctggcccttcatctgttcaggaacacacacacacacacactcacacacgcacacacaatcacaatttgctacagcaacaaaaaagacattgggctgtggcattattaattaaagatgatatccagtctcc

SEQ ID NO: 6 - protein, 1352 aa, Homo sapiens [sequence omitted]

SEQ ID NO: 7 - DNA, 3631 bp, Homo sapiens
  CDS (154)..(3543)
gcggccgccccattcccagaccggccgccagcccatctggttagctcccgccgctccgcgccgcccgggagtcgggagccgcggggaaccgggcacctgcacccgcctctgggagtgagtggttccagctggtgcctggcctgtgtctcttggatgccctgtggcttcagtccgtctcctgttgcccaccacctcgtccctgggccgcctgataccccagcccaacagctaaggtgtggatggacagtagggggctggcttctctcactggtcaggggtcttctcccctgtctgcctcccggagctaggactgcagaggggcctatcatggtgcttgcaggccccctggctgtctcgctgttgctgcccagcctcacactgctggtgtcccacctctccagctcccaggatgtctccagtgagcccagcagtgagcagcagctgtgcgcccttagcaagcaccccaccgtggcctttgaagacctgcagccgtgggtctctaacttcacctaccctggagcccgggatttctcccagctggctttggacccctccgggaaccagctcatcgtgggagccaggaactacctcttcagactcagccttgccaatgtctctcttcttcaggccacagagtgggcctccagtgaggacacgcgccgctcctgccaaagcaaagggaagactgaggaggagtgtcagaactacgtgcgagtcctgatcgtcgccggccggaaggtgttcatgtgtggaaccaatgccttttcccccatgtgcaccagcagacaggtggggaacctcagccggactactgagaagatcaatggtgtggcccgctgcccctatgacccacgccacaactccacagctgtcatctcctcccagggggagctctatgcagccacggtcatcgacttctcaggtcgggaccctgccatctaccgcagcctgggcagtgggccaccgcttcgcactgcccaatataactccaagtggcttaatgagccaaacttcgtggcagcctatgatattgggctgtttgcatacttcttcctgcgggagaacgcagtggagcacgactgtggacgcaccgtgtactctcgcgtggcccgcgtgtgcaagaatgacgtggggggccgattcctgctggaggacacatggaccacattcatgaaggcccggctcaactgctcccgcccgggcgaggtccccttctactataacgagctgcagagtgccttccacttgccagagcaggacctcatctatggagttttcacaaccaacgtaaacagcatcgcggcttctgctgtctgcgccttcaacctcagtgctatctcccaggctttcaatggcccatttcgctaccaggagaaccccagggctgcctggctccccatagccaaccccatccccaatttccagtgtggcaccctgcctgagaccggtcccaacgagaacctgacggagcgcagcctgcaggacgcgcagcgcctcttcctgatgagcgaggccgtgcagccggtgacacccgagccctgtgtcacccaggacagcgtgcgcttctcacacctcgtggtggacctggtgcaggctaaagacacgctctaccatgtactctacattggcaccgagtcgggcaccatcctgaaggcgctgtccacggcgagccgcagcctccacggctgctacctggaggagctgcacgtgctgccccccgggcgccgcgagcccctgcgcagcctgcgcatcctgcacagcgcccgcgcgctcttcgtggggctgagagacggcgtcctgcgggtcccactggagaggtgcgccgcctaccgcagccagggggcatgcctgggggcccgggacccgtactgtggctgggacgggaagcagcaacgttgcagcacactcgaggacagctccaacatgagcctctggacccagaacatcaccgcctgtcctgtgcggaatgtgacacgggatgggggcttcggcccatggtcaccatggcaaccatgtgagcacttggatggggacaactcaggctcttgcctgtgtcgagctcgatcctgtgattcccctcgaccccgctgtgggggccttgactgcctggggccagccatccacatcgccaactgctccaggaatggggcgtggaccccgtggtcatcgtgggcgctgtgcagcacgtcctgtggcatcggcttccaggtccgccagcgaagttgcagcaaccctgctccccgccacgggggccgcatctgcgtgggcaagagccgggaggaacggttctgtaatgagaacacgccttgcccggtgcccatcttctgggcttcctggggctcctggagcaagtgcagcagcaactgtggagggggcatgcagtcgcggcgtcgggcctgcgagaacggcaactcctgcctgggctgcggcgtggagttcaagacgtgcaaccccgagggctgccccgaagtgcggcgcaacaccccctggacgccgtggctgcccgtgaacgtgacgcagggcggggcacggcaggagcagcggttccgcttcacctgccgcgcgccccttgcagacccgcacggcctgcagttcggcaggagaaggaccgagacgaggacctgtcccgcggacggctccggctcctgcgacaccgacgccctggtggaggacctcctgcgcagcgggagcacctccccgcacacggtgagcgggggctgggccgcctggggcccgtggtcgtcctgctcccgggactgcgagctgggcttccgcgtccgcaagagaacgtgcactaacccggagccccgcaacgggggcctgccctgcgtgggcgatgctgccgagtaccaggactgcaacccccaggcttgcccagttcggggtgcttggtcctgctggacctcatggtctccatgctcagcttcctgtggtgggggtcactatcaacgcacccgttcctgcaccagccccgcaccctccccagaaggctggtcgccctggtctgagtggagtaagtgcactgacgacggagcccagagccgaagccggcactgtgaggagctcctcccagggtccagcgcctgtgctggaaacagcagccagagccgcccctgcccctacagcgagattcccgtcatcctgccagcctccagcatggaggaggccaccggctgtgcagggttcaatctcatccacttggtggccacgggcatctcctgcttcttgggctctgggctcctgaccctagcagtgtacctgtcttgccagcactgccagcgtcagtcccaggagtccacactggtccatcctgccacccccaaccatttgcactacaagggcggaggcaccccgaagaatgaaaagtacacacccatggaattcaagaccctgaacaagaataacttgatccctgatgacagagccaacttctacccattgcagcagaccaatgtgtacacgactacttactacccaagccccctgaacaaacacagcttccggcccgaggcctcacctggacaacggtgcttccccaacagctgataccgccgtcctggggacttgggcttcttgccttcataaggcacagagcagatggagatgggacagtggagccagtttggtttct

SEQ ID NO: 8 - protein, 1130 aa, Homo sapiens
MPCGFSPSPVAHHLVPGPPDTPAQQLRCGWTVGGWLLSLVRGLLPCLPPGARTAEGPIMVLAGPLAVSLLLPSLTLLVSHLSSSQDVSSEPSSEQQLCALSKHPTVAFEDLQPWVSNFTYPGARDFSQLALDPSGNQLIVGARNYLFRLSLANVSLLQATEWASSEDTRRSCQSKGKTEEECQNYVRVLIVAGRKVFMCGTNAFSPMCTSRQVGNLSRTTEKINGVARCPYDPRHNSTAVISSQGELYAATVIDFSGRDPAIYRSLGSGPPLRTAQYNSKWLNEPNFVAAYDIGLFAYFFLRENAVEHDCGRTVYSRVARVCKNDVGGRFLLEDTWTTFMKARLNCSRPGEVPFYYNELQSAFHLPEQDLIYGVFTTNVNSIAASAVCAFNLSAISQAFNGPFRYQENPRAAWLPIANPIPNFQCGTLPETGPNENLTERSLQDAQRLFLMSEAVQPVTPEPCVTQDSVRFSHLVVDLVQAKDTLYHVLYIGTESGTILKALSTASRSLHGCYLEELHVLPPGRREPLRSLRILHSARALFVGLRDGVLRVPLERCAAYRSQGACLGARDPYCGWDGKQQRCSTLEDSSNMSLWTQNITACPVRNVTRDGGFGPWSPWQPCEHLDGDNSGSCLCRARSCDSPRPRCGGLDCLGPAIHIANCSRNGAWTPWSSWALCSTSCGIGFQVRQRSCSNPAPRHGGRICVGKSREERFCNENTPCPVPIFWASWGSWSKCSSNCGGGMQSRRRACENGNSCLGCGVEFKTCNPEGCPEVRRNTPWTPWLPVNVTQGGARQEQRFRFTCRAPLADPHGLQFGRRRTETRTCPADGSGSCDTDALVEDLLRSGSTSPHTVSGGWAAWGPWSSCSRDCELGFRVRKRTCTNPEPRNGGLPCVGDAAEYQDCNPQACPVRGAWSCWTSWSPCSASCGGGHYQRTRSCTSPAPSPEGWSPWSEWSKCTDDGAQSRSRHCEELLPGSSACAGNSSQSRPCPYSEIPVILPASSMEEATGCAGFNLIHLVATGISCFLGSGLLTLAVYLSCQHCQRQSQESTLVHPATPNHLHYKGGGTPKNEKYTPMEFKTLNKNNLIPDDRANFYPLQQTNVYTTTYYPSPLNKHSFRPEASPGQRCFPNS

SEQ ID NO: 9 - DNA, 1203 bp, Homo sapiens
  CDS (1)..(1203)
ggatccggcccatggtcaccatggcaaccatgtgagcacttggatggggacaactcaggctcttgcctgtgtcgagctcgatcctgtgattcccctcgaccccgctgtgggggccttgactgcctggggccagccatccacatcgccaactgctccaggaatggggcgtggaccccgtggtcatcgtgggcgctgtgcagcacgtcctgtggcatcggcttccaggtccgccagcgaagttgcagcaaccctgctccccgccacgggggccgcatctgcgtgggcaagagccgggaggaacggttctgtaatgagaacacgccttgcccggtgcccatcttctgggcttcctggggctcctggagcaagtgcagcagcaactgtggagggggcatgcggtcgcggcgtcgggcctgcgagaacggcaactcctgcctgggctgcggcgtggagttcaagacgtgcaaccccgagggctgccccgaagtgcggcgcaacaccccctggacgccgtggctgcccgtgaacgtgacgcagggcggggcacggcaggagcagcggttccgcttcacctgccgcgcgccccttgcagacccgcacggcctgcagttcggcaggagaaggaccgagacgaggacctgtcccgcggacggctccggctcctgcgacaccgacgccctggtggaggacctcctgcgcagcgggagcacctccccgcacacggtgagcgggggctgggccgcctggggcccgtggtcgtcctgctcccgggactgcgagctgggcttccgcgtccgcaagagaacgtgcactaacccggagccccgcaacgggggcctgccctgcgtgggcgatgctgccgagtaccaggactgcaacccccaggcttgcccagttcggggtgcttggtcctgctggacctcatggtctccatgctcagcttcctgtggtgggggtcactatcaacgcacccgttcctgcaccagccccgcaccctccccaggtgaggacatctgtctcgggctgcacacggaggaggcactatgtgccacacaggcctgcccagaaggctggtcgccctggtctgagtggagtaagtgcactgacgacggagcccagagccgaagccggcactgtgaggagctcctcccagggtccagcgcctgtgctggaaacagcagccagagccgcccctgcgtcgac

SEQ ID NO: 10 - protein, 401 aa, Homo sapiens
GSGPWSPWQPCEHLDGDNSGSCLCRARSCDSPRPRCGGLDCLGPAIHIANCSRNGAWTPWSSWALCSTSCGIGFQVRQRSCSNPAPRHGGRICVGKSREERFCNENTPCPVPIFWASWGSWSKCSSNCGGGMRSRRRACENGNSCLGCGVEFKTCNPEGCPEVRRNTPWTPWLPVNVTQGGARQEQRFRFTCRAPLADPHGLQFGRRRTETRTCPADGSGSCDTDALVEDLLRSGSTSPHTVSGGWAAWGPWSSCSRDCELGFRVRKRTCTNPEPRNGGLPCVGDAAEYQDCNPQACPVRGAWSCWTSWSPCSASCGGGHYQRTRSCTSPAPSPGEDICLGLHTEEALCATQACPEGWSPWSEWSKCTDDGAQSRSRHCEELLPGSSACAGNSSQSRPCVD

SEQ ID NO: 11 - DNA, 1203 bp, Homo sapiens
  CDS (1)..(1203)
ggatccggcccatggtcaccatggcaaccatgtgagcacttggatggggacaactcaggctcttgcctgtgtcgagctcgatcctgtgattcccctcgaccccgctgtgggggccttgactgcctggggccagccatccacatcgccaactgctccaggaatggggcgtggaccccgtggtcatcgtgggcgctgtgcagcacgtcctgtggcatcggcttccaggtccgccagcgaagttgcagcaaccctgctccccgccacgggggccgcatctgcgtgggcaagagccgggaggaacggttctgtaatgagaacacgccttgcccggtgcccatcttctgggcttcctggggctcctggagcaagtgcagcagcaactgtggagggggcatgcagtcgcggcgtcgggcctgcgagaacggcaactcctgcctgggctgcggcgtggagttcaagacgtgcaaccccgagggctgccccgaagtgcggcgcaacaccccctggacgccgtggctgcccgtgaacgtgacgcagggcggggcacggcaggagcagcggttccgcttcacctgccgcgcgccccttgcagacccgcacggcctgcagttcggcaggagaaggaccgagacgaggacctgtcccgcggacggctccggctcctgcgacaccgacgccctggtggaggacctcctgcgcagcgggagcacctccccgcacacggtgagcgggggctgggccgcctggggcccgtggtcgtcctgctcccgggactgcgagctgggcttccgcgtccgcaagagaacgtgcactaacccggagtcccgcaacgggggcctgccctgcgtgggcgatgctgccgagtaccaggactgcaacccccaggcttgcccagttcggggtgcttggtcctgctggacctcatggtctccatgctcagcttcctgtggtgggggtcactatcaacgcacccgttcctgcaccagccccgcaccctccccaggtgaggacatctgtctcgggctgcacacggaggaggcactatgtgccacacaggcctgcccagaaggctggtcgccctggtctgagtggagtaagtgcactgacgacggagcccagagccgaagccggcactgtgaggagctcctcccagggtccagcgcctgtgctggaaacagcagccagagccgcccctgcgtcgac

SEQ ID NO: 12 - protein, 401 aa, Homo sapiens
GSGPWSPWQPCEHLDGDNSGSCLCRARSCDSPRPRCGGLDCLGPAIHIANCSRNGAWTPWSSWALCSTSCGIGFQVRQRSCSNPAPRHGGRICVGKSREERFCNENTPCPVPIFWASWGSWSKCSSNCGGGMQSRRRACENGNSCLGCGVEFKTCNPEGCPEVRRNTPWTPWLPVNVTQGGARQEQRFRFTCRAPLADPHGLQFGRRRTETRTCPADGSGSCDTDALVEDLLRSGSTSPHTVSGGWAAWGPWSSCSRDCELGFRVRKRTCTNPESRNGGLPCVGDAAEYQDCNPQACPVRGAWSCWTSWSPCSASCGGGHYQRTRSCTSPAPSPGEDICLGLHTEEALCATQACPEGWSPWSEWSKCTDDGAQSRSRHCEELLPGSSACAGNSSQSRPCVD

SEQ ID NO: 13 - DNA, 1203 bp, Homo sapiens
  CDS (1)..(1203)
ggatccggcccatggtcaccatggcaaccatgtgagcacttggatggggacaactcaggctcttgcctgtgtcgagctcgatcctgtgattcccctcgaccccgctgtgggggccttgactgcctggggccagccatccacatcgccaactgctccaggaatggggcgtggaccccgtggtcatcgtgggcgctgtgcagcacgtcctgtggcatcggcttccaggtccgccagcgaagttgcagcaaccctgctccccgccacgggggccgcatctgcgtgggcaagagccgggaggaacggttctgtaatgagaacacgccttgcccggtgcccatcttctgggcttcctggggctcctggagcaagtgcagcagcaactgtggagggggcatgcagtcgcggcgtcgggcctgcgagaacggcaactcctgcctgggctgcggcgtggagttcaagacgtgcaaccccgagggctgccccgaagtgcggcgcaacaccccctggacgccgtggctgcccgtgaacgtgacgcagggcggggcacggcaggagcagcggttccgcttcacctgccgcgcgccccttgcagacccgcacggcctgcagttcggcaggagaaggaccgagacgaggacctgtcccgcggacggctccggctcctgcgacaccgacgccctggtggaggacctcctgcgcagcgggagcacctccccgcacacggtgagcgggggctgggccgcctggggcccgtggtcgtcctgctcccgggactgcgagctgggcttccgcgtccgcaagagaacgtgcactaacccggagccccgcaacgggggcctgccctgcgtgggcgatgctgccgagtaccaggactgcaacccccaggcttgcccagttcggggtgcttggtcctgctggacctcatggtctccatgctcagcttcctgtggtgggggtcactatcaacgcacccgttcctgcaccagccccgcaccctccccaggtgaggacatctgtctcgggctgcacacggaggaggcactatgtgccacacaggcctgcccagaaggctggtcgccctggtctgagtggagtaagtgcactgacgacggagcccagagccgaagccggcactgtgaggagctcctcccagggtccagcgcctgtgctggaaacagcagccagagccgcccctgcgtcgac

SEQ ID NO: 14 - protein, 401 aa, Homo sapiens
GSGPWSPWQPCEHLDGDNSGSCLCRARSCDSPRPRCGGLDCLGPAIHIANCSRNGAWTPWSSWALCSTSCGIGFQVRQRSCSNPAPRHGGRICVGKSREERFCNENTPCPVPIFWASWGSWSKCSSNCGGGMQSRRRACENGNSCLGCGVEFKTCNPEGCPEVRRNTPWTPWLPVNVTQGGARQEQRFRFTCRAPLADPHGLQFGRRRTETRTCPADGSGSCDTDALVEDLLRSGSTSPHTVSGGWAAWGPWSSCSRDCELGFRVRKRTCTNPEPRNGGLPCVGDAAEYQDCNPQACPVRGAWSCWTSWSPCSASCGGGHYQRTRSCTSPAPSPGEDICLGLHTEEALCATQACPEGWSPWSEWSKCTDDGAQSRSRHCEELLPGSSACAGNSSQSRPCVD

SEQ ID NO: 15 - DNA, 1203 bp, Homo sapiens
  CDS (1)..(1203)
ggatccggcccatggtcaccatggcaaccatgtgagcacttggatggggacaactcaggctcttgcctgtgtcgagctcgatcctgtgattcccctcgaccccgctgtgggggccttgactgcctggggccaaccatccacatcgccaactgctccaggaatggggcgtggaccccgtggtcatcgtgggcgctgtgcagcacgtcctgtggcatcggcttccaggtccgccagcgaagttgcagcaaccctgctccccgccacgggggccgcatctgcgtgggcaagagccgggaggaacggttctgtaatgagaacacgccttgcccggtgcccatcttctgggcttcctggggctcctggagcaagtgcggcagcaactgtggagggggcatgcagtcgcggcgtcgggcctgcgagaacggcaactcctgcctgggctgcggcgtggagttcaagacgtgcaaccccgagggctgccccgaagtgcggcgcaacaccccctggacgccgtggctgcccgtgaacgtgacgcagggcggggcacggcaggagcagcggttccgcttcacctgccgcgcgccccttgcagacccgcacggcctgcagttcggcaggagaaggaccgagacgaggacctgtcccgcggacggctccggctcctgcgacaccgacgccctggtggaggtcctcctgcgcagcgggagcacctccccgcacacggtgagcgggggctgggccgcctggggcccgtggtcgtcctgctcccgggactgcgagctgggcttccgcgtccgcaagagaacgtgcactaacccggagccccgcaacgggggcctgccctgcgtgggcgatgctgccgagtaccaggactgcaacccccaggcttgcccagttcggggtgcttggtcctgctggacctcatggtctccatgctcagcttcctgtggtgggggtcactatcaacgcacccgttcctgcaccagccccgcaccctccccaggtgaggacatctgtctcgggctgcacacggaggaggcactatgtgccacacaggcctgcccagaaggctggtcgccctggtctgagtggagtaagtgcactgacgacggagcccagagccgaagccggcactgtgaggagctcctcccagggtccagcgcctgtgctggaaacagcagccagagccgcccctgcgtcgac

SEQ ID NO: 16 - protein, 401 aa, Homo sapiens
GSGPWSPWQPCEHLDGDNSGSCLCRARSCDSPRPRCGGLDCLGPTIHIANCSRNGAWTPWSSWALCSTSCGIGFQVRQRSCSNPAPRHGGRICVGKSREERFCNENTPCPVPIFWASWGSWSKCGSNCGGGMQSRRRACENGNSCLGCGVEFKTCNPEGCPEVRRNTPWTPWLPVNVTQGGARQEQRFRFTCRAPLADPHGLQFGRRRTETRTCPADGSGSCDTDALVEVLLRSGSTSPHTVSGGWAAWGPWSSCSRDCELGFRVRKRTCTNPEPRNGGLPCVGDAAEYQDCNPQACPVRGAWSCWTSWSPCSASCGGGHYQRTRSCTSPAPSPGEDICLGLHTEEALCATQACPEGWSPWSEWSKCTDDGAQSRSRHCEELLPGSSACAGNSSQSRPCVD

SEQ ID NO: 17 - DNA, 4233 bp, Homo sapiens
  CDS (2)..(3280)
catggtgcttgcaggccccctggctgtctcgctgttgctgcccagcctcacactgctggtgtcccacctctccagctcccaggatgtctccagtgagcccagcagtgagcagcagctgtgcgcccttagcaagcaccccaccgtggcctttgaagacctgcagccgtgggtctctaacttcacctaccctggagcccgggatttctcccagctggctttggacccctccgggaaccagctcatcgtgggagccaggaactacctcttcagactcagccttgccaatgtctctcttcttcaggccacagagtgggcctccagtgaggacacgcgccgctcctgccaaagcaaagggaagactgaggaggagtgtcagaactacgtgcgagtcctgatcgtcgccggccggaaggtgttcatgtgtggaaccaatgccttttcccccatgtgcaccagcagacaggtggggaacctcagccggactactgagaagatcaatggtgtggcccgctgcccctatgacccacgccacaactccacagctgtcatctcctcccagggggagctctatgcagccacggtcatcgacttctcaggtcgggaccctgccatctaccgcagcctgggcagtgggccaccgcttcgcactgcccaatataactccaagtggcttaatgagccaaacttcgtggcagcctatgatattgggctgtttgcatacttcttcctgcgggagaacgcagtggagcacgactgtggacgcaccgtgtactctcgcgtggcccgcgtgtgcaagaatgacgtggggggccgattcctgctggaggacacatggaccacattcatgaaggcccggctcaactgctcccgcccgggcgaggtccccttctactataacgagctgcagagtgccttccacttgccagagcaggacctcatctatggagttttcacaaccaacgtaaacagcatcgcggcttctgctgtctgcgccttcaacctcagtgctatctcccaggctttcaatggcccatttcgctaccaggagaaccccagggctgcctggctccccatagccaaccccatccccaatttccagtgtggcaccctgcctgagaccggtcccaacgagaacctgacggagcgcagcctgcaggacgcgcagcgcctcttcctgatgagcgaggccgtgcagccggtgacacccgagccctgtgtcacccaggacagcgtgcgcttctcacacctcgtggtggacctggtgcaggctaaagacacgctctaccatgtactctacattggcaccgagtcgggcaccatcctgaaggcgctgtccacggcgagccgcagcctccacggctgctacctggaggagctgcacgtgctgccccccgggcgccgcgagcccctgcgcagcctgcgcatcctgcacagcgcccgcgcgctcttcgtggggctgagagacggcgtcctgcgggtcccactggagaggtgcgccgcctaccgcagccagggggcatgcctgggggcccgggacccgtactgtggctgggacgggaagcagcaacgttgcagcacactcgaggacagctccaacatgagcctctggacccagaacatcaccgcctgtcctgtgcggaatgtgacacgggatgggggcttcggcccatggtcaccatggcaaccatgtgagcacttggatggggacaactcaggctcttgcctgtgtcgagctcgatcctgtgattcccctcgaccccgctgtgggggccttgactgcctggggccagccatccacatcgccaactgctccaggaatggggcgtggaccccgtggtcatcgtgggcgctgtgcagcacgtcctgtggcatcggcttccaggtccgccagcgaagttgcagcaaccctgctccccgccacgggggccgcatctgcgtgggcaagagccgggaggaacggttctgtaatgagaacacgccttgcccggtgcccatcttctgggcttcctggggctcctggagcaagtgcagcagcaactgtggagggggcatgcagtcgcggcgtcgggcctgcgagaacggcaactcctgcctgggctgcggcgtggagttcaagacgtgcaaccccgagggctgccccgaagtgcggcgcaacaccccctggacgccgtggctgcccgtgaacgtgacgcagggcggggcacggcaggagcagcggttccgcttcacctgccgcgcgccccttgcagacccgcacggcctgcagttcggcaggagaaggaccgagacgaggacctgtcccgcggacggctccggctcctgcgacaccgacgccctggtggaggacctcctgcgcagcgggagcacctccccgcacacggtgagcgggggctgggccgcctggggcccgtggtcgtcctgctcccgggactgcgagctgggcttccgcgtccgcaagagaacgtgcactaacccggagccccgcaacgggggcctgccctgcgtgggcgatgctgccgagtaccaggactgcaacccccaggcttgcccagttcggggtgcttggtcctgctggacctcatggtctccatgctcagcttcctgtggtgggggtcactatcaacgcacccgttcctgcaccagccccgcaccctccccaggtgaggacatctgtctcgggctgcacacggaggaggcactatgtgccacacaggcctgcccagaaggctggtcgccctggtctgagtggagtaagtgcactgacgacggagcccagagccgaagccggcactgtgaggagctcctcccagggtccagcgcctgtgctggaaacagcagccagagccgcccctgcccctacagcgagattcccgtcatcctgccagcctccagcatggaggaggccaccggctgtgcagggttcaatctcatccacttggtggccacgggcatctcctgcttcttgggctctgggctcctgaccctagcagtgtacctgtcttgccagcactgccagcgtcagtcccaggagtccacactggtccatcctgccacccccaaccatttgcactacaagggcggaggcaccccgaagaatgaaaagtacacacccatggaattcaagaccctgaacaagaataacttgatccctgatgacagagccaacttctacccattgcagcagaccaatgtgtacacgactacttactacccaagccccctgaacaaacacagcttccggcccgaggcctcacctggacaacggtgcttccccaacagctgataccgccgtcctggggacttgggcttcttgccttcataaggcacagagcagatggagatgggacagtggagccagtttggttttctccctctgcactaggccaagaacttgctgccttgcctgtggggggtcccatccggcttcagagagctctggctggcattgaccatgggggaaagggctggtttcaggctgacatatggccgcaggtccagttcagcccaggtctctcatggttatcttccaacccactgtcacgctgacactatgctgccatgcctgggctgtggacctactgggcatttgaggaactggagaatggagatggcaagagggcaggcttttaagtttgggttggagacaacttcctgtggcccccacaagctgagtctggccttctccagctggccccaaaaaaggcctttgctacatcctgattatctctgaaagtaatcaatcaagtggctccagtagctctggattttctgccagggctgggccattgtggtgctgccccagtatgacatgggaccaaggccagcgcaggttatccacctctgcctggaagtctatactctacccagggcatccctctggtcagaggcagtgagtactgggaactggaggctgacctgtgcttagaagtcctttaatctgggctggtacaggcctcagccttgccctcaatgcacgaaaggtggcccaggagagaggatcaatgccacaggaggcagaagtctggcctctgtgcctctatggagactatcttccagttgctgctcaacagagttgttggctgagacctgcttgggagtctctgctggcccttcatctgttcaggaacacacacacacacacactcacacacgcacacacaatcacaatttgctacagcaacaaaaaagacattgggctgtggcattattaattaaagatgatatccagtctcc

SEQ ID NO: 18 - protein, 1093 aa, Homo sapiens
MVLAGPLAVSLLLPSLTLLVSHLSSSQDVSSEPSSEQQLCALSKHPTVAFEDLQPWVSNFTYPGARDFSQLALDPSGNQLIVGARNYLFRLSLANVSLLQATEWASSEDTRRSCQSKGKTEEECQNYVRVLIVAGRKVFMCGTNAFSPMCTSRQVGNLSRTTEKINGVARCPYDPRHNSTAVISSQGELYAATVIDFSGRDPAIYRSLGSGPPLRTAQYNSKWLNEPNFVAAYDIGLFAYFFLRENAVEHDCGRTVYSRVARVCKNDVGGRFLLEDTWTTFMKARLNCSRPGEVPFYYNELQSAFHLPEQDLIYGVFTTNVNSIAASAVCAFNLSAISQAFNGPFRYQENPRAAWLPIANPIPNFQCGTLPETGPNENLTERSLQDAQRLFLMSEAVQPVTPEPCVTQDSVRFSHLVVDLVQAKDTLYHVLYIGTESGTILKALSTASRSLHGCYLEELHVLPPGRREPLRSLRILHSARALFVGLRDGVLRVPLERCAAYRSQGACLGARDPYCGWDGKQQRCSTLEDSSNMSLWTQNITACPVRNVTRDGGFGPWSPWQPCEHLDGDNSGSCLCRARSCDSPRPRCGGLDCLGPAIHIANCSRNGAWTPWSSWALCSTSCGIGFQVRQRSCSNPAPRHGGRICVGKSREERFCNENTPCPVPIFWASWGSWSKCSSNCGGGMQSRRRACENGNSCLGCGVEFKTCNPEGCPEVRRNTPWTPWLPVNVTQGGARQEQRFRFTCRAPLADPHGLQFGRRRTETRTCPADGSGSCDTDALVEDLLRSGSTSPHTVSGGWAAWGPWSSCSRDCELGFRVRKRTCTNPEPRNGGLPCVGDAAEYQDCNPQACPVRGAWSCWTSWSPCSASCGGGHYQRTRSCTSPAPSPGEDICLGLHTEEALCATQACPEGWSPWSEWSKCTDDGAQSRSRHCEELLPGSSACAGNSSQSRPCPYSEIPVILPASSMEEATGCAGFNLIHLVATGISCFLGSGLLTLAVYLSCQHCQRQSQESTLVHPATPNHLHYKGGGTPKNEKYTPMEFKTLNKNNLIPDDRANFYPLQQTNVYTTTYYPSPLNKHSFRPEASPGQRCFPNS

SEQ ID NO: 19 - DNA, 1203 bp, Artificial Sequence; identical to SEQ ID NO: 15
  Description of Artifical Sequence:  Primer/Probe

SEQ ID NO: 20 - protein, 397 aa, Artificial Sequence
  Description of Artifical Sequence:  Domain
GPWSPWQPCEHLDGDNSGSCLCRARSCDSPRPRCGGLDCLGPTIHIANCSRNGAWTPWSSWALCSTSCGIGFQVRQRSCSNPAPRHGGRICVGKSREERFCNENTPCPVPIFWASWGSWSKCGSNCGGGMQSRRRACENGNSCLGCGVEFKTCNPEGCPEVRRNTPWTPWLPVNVTQGGARQEQRFRFTCRAPLADPHGLQFGRRRTETRTCPADGSGSCDTDALVEVLLRSGSTSPHTVSGGWAAWGPWSSCSRDCELGFRVRKRTCTNPEPRNGGLPCVGDAAEYQDCNPQACPVRGAWSCWTSWSPCSASCGGGHYQRTRSCTSPAPSPGEDICLGLHTEEALCATQACPEGWSPWSEWSKCTDDGAQSRSRHCEELLPGSSACAGNSSQSRPC

SEQ ID NO: 21 - DNA, 6408 bp, Artificial Sequence
  Description of Artifical Sequence:  Primer/Probe
cctgggactctgggagaatggtccagagctcattgtccttgttgataaaatgatagatttggactcaatatcccatgctgcctcttccaacttgatttttaccccagactgggctaccagactggtatgcccacacatgcccgtttcctttcttttcttctctgcatctctgcctttgtgtccagagcgtgttttccctttgcaagtttctctccattctgcacattatgagtttcagcatttctgttgccctagaaagtctatctttgagatcttgcactgtttctctttttacagtgtctcataaactcccttcttggattcagaaccaccctttctttcccattatcctgtcaaactgcttcttgccatggtccaggggtaggaggatggcaggcaggaggtgcttctctggggctcttagtgtctcaattcttctgctttatctgggttttcctttacccagaattttattatgtaaaatgcttcactcagactttgttctaattatccaatttttggcatactctagaaagtcttttgatattttccttcctccaacttatctatttttatttcatagttctctttggttatctcttagaatcacactttcctggttttaatttttcaaatcctttgtctttctcactcgttcttaggtcacctttttttacattttcaaatatattttttgttcagcagagggctcccttcccatccctcttgcagcccgggcagctaggatttgaagcttgccccttgaatctttctctcccgccttctagccatcagaaacactagatcacttaaacttgtaaacaattcggcctcgctccttgtgattgcgctaaaccttccgtcctcagctgagaacgctccaccacctccccggatcgctcatctcttggctgccctcccactgttcctgatgttattttactccccgtatcccctactcgttcttcacaattctgtagggtgcgtattactaaccccagtttacagctgaggaaactgaggcttggagaggttcgctcggtatcgtacagtttgcaaggttaaccctaatccggccagttctggctttccagcccagcccagcagcctagcctccctctctgccgctgcaggttataacggctctcccccgttttacacgaggtcccttccccttcaaatccacaggcaggaagatcgttccgaactgacggggctggggaatgtgggagtccggagtggggtttgggggagcttcctcaggccctgagtgttggggtgggcaggccgcgccgatggccctcggggatgtcacattcgagatggggtgaccgagaacggcaaggcgggatgtggcaaacggcggcaagtgctcggagtcctaggtcttgccgccggaatgccggccggggaaggggcttcggcccaccgggctggtcaccacactcggcaggcccggggcgggagtcggccgagcagccgcgggatgcagggcgccccctcgcgctcctccgcgcgcctcgaggctggcgggtgcagcgcccgccgcggcaggtctgctccagccccctcctctttttcgctcccgctcccctccttctctccctttgcttgcaactcctcccccaccgccccctccctccttctgctcccgcggtctcctcctccctgctctctccgagcgccgggtcgggagctagttggagcgcgggggttggtgccagagcccagctccgccgagccgggcgggtcggcagcgcatccagcggctgctgggagcccgagcgcagcgggcgcgggcccgggtggggactgcaccggagcgctgagagctggaggccgttcctgcgcggccgccccattcccagaccggccgccagcccatctggttagctcccgccgctccgcgccgcccgggagtcgggagccgcggggaaccgggcacctgcacccgcctctgggagtgagtggttccagctggtgcctggcctgtgtctcttggatgccctgtggcttcagtccgtctcctgttgcccaccacctcgtccctgggccgcctgataccccagcccaacagctaaggtgtggatggacagtagggggctggcttctctcactggtcaggggtcttctcccctgtctgcctcccggagctaggactgcagaggggcctatcatggtgcttgcaggccccctggctgtctcgctgttgctgcccagcctcacactgctggtgtcccacctctccagctcccaggatgtctccagtgagcccagcagtgagcagcagctgtgcgcccttagcaagcaccccaccgtggcctttgaagacctgcagccgtgggtctctaacttcacctaccctggagcccgggatttctcccagctggctttggacccctccgggaaccagctcatcgtgggagccaggaactacctcttcagactcagccttgccaatgtctctcttcttcaggccacagagtgggcctccagtgaggacacgcgccgctcctgccaaagcaaagggaagactgaggaggagtgtcagaactacgtgcgagtcctgatcgtcgccggccggaaggtgttcatgtgtggaaccaatgccttttcccccatgtgcaccagcagacaggtggggaacctcagccggactactgagaagatcaatggtgtggcccgctgcccctatgacccacgccacaactccacagctgtcatctcctcccagggggagctctatgcagccacggtcatcgacttctcaggtcgggaccctgccatctaccgcagcctgggcagtgggccaccgcttcgcactgcccaatataactccaagtggcttaatgagccaaacttcgtggcagcctatgatattgggctgtttgcatacttcttcctgcgggagaacgcagtggagcacgactgtggacgcaccgtgtactctcgcgtggcccgcgtgtgcaagaatgacgtggggggccgattcctgctggaggacacatggaccacattcatgaaggcccggctcaactgctcccgcccgggcgaggtccccttctactataacgagctgcagagtgccttccacttgccagagcaggacctcatctatggagttttcacaaccaacgtaaacagcatcgcggcttctgctgtctgcgccttcaacctcagtgctatctcccaggctttcaatggcccatttcgctaccaggagaaccccagggctgcctggctccccatagccaaccccatccccaatttccagtgtggcaccctgcctgagaccggtcccaacgagaacctgacggagcgcagcctgcaggacgcgcagcgcctcttcctgatgagcgaggccgtgcagccggtgacacccgagccctgtgtcacccaggacagcgtgcgcttctcacacctcgtggtggacctggtgcaggctaaagacacgctctaccatgtactctacattggcaccgagtcgggcaccatcctgaaggcgctgtccacggcgagccgcagcctccacggctgctacctggaggagctgcacgtgctgccccccgggcgccgcgagcccctgcgcagcctgcgcatcctgcacagcgcccgcgcgctcttcgtggggctgagagacggcgtcctgcgggtcccactggagaggtgcgccgcctaccgcagccagggggcatgcctgggggcccgggacccgtactgtggctgggacgggaagcagcaacgttgcagcacactcgaggacagctccaacatgagcctctggacccagaacatcaccgcctgtcctgtgcggaatgtgacacgggatgggggcttcggcccatggtcaccatggcaaccatgtgagcacttggatggggacaactcaggctcttgcctgtgtcgagctcgatcctgtgattcccctcgaccccgctgtgggggccttgactgcctggggccagccatccacatcgccaactgctccaggaatggggcgtggaccccgtggtcatcgtgggcgctgtgcagcacgtcctgtggcatcggcttccaggtccgccagcgaagttgcagcaaccctgctccccgccacgggggccgcatctgcgtgggcaagagccgggaggaacggttctgtaatgagaacacgccttgcccggtgcccatcttctgggcttcctggggctcctggagcaagtgcagcagcaactgtggagggggcatgcagtcgcggcgtcgggcctgcgagaacggcaactcctgcctgggctgcggcgtggagttcaagacgtgcaaccccgagggctgccccgaagtgcggcgcaacaccccctggacgccgtggctgcccgtgaacgtgacgcagggcggggcacggcaggagcagcggttccgcttcacctgccgcgcgccccttgcagacccgcacggcctgcagttcggcaggagaaggaccgagacgaggacctgtcccgcggacggctccggctcctgcgacaccgacgccctggtggaggacctcctgcgcagcgggagcacctccccgcacacggtgagcgggggctgggccgcctggggcccgtggtcgtcctgctcccgggactgcgagctgggcttccgcgtccgcaagagaacgtgcactaacccggagccccgcaacgggggcctgccctgcgtgggcgatgctgccgagtaccaggactgcaacccccaggcttgcccagttcggggtgcttggtcctgctggacctcatggtctccatgctcagcttcctgtggtgggggtcactatcaacgcacccgttcctgcaccagccccgcaccctccccaggtgaggacatctgtctcgggctgcacacggaggaggcactatgtgccacacaggcctgcccagaaggctggtcgccctggtctgagtggagtaagtgcactgacgacggagcccagagccgaagccggcactgtgaggagctcctcccagggtccagcgcctgtgctggaaacagcagccagagccgcccctgcccctacagcgagattcccgtcatcctgccagcctccagcatggaggaggccaccggctgtgcagggttcaatctcatccacttggtggccacgggcatctcctgcttcttgggctctgggctcctgaccctagcagtgtacctgtcttgccagcactgccagcgtcagtcccaggagtccacactggtccatcctgccacccccaaccatttgcactacaagggcggaggcaccccgaagaatgaaaagtacacacccatggaattcaagaccctgaacaagaataacttgatccctgatgacagagccaacttctacccattgcagcagaccaatgtgtacacgactacttactacccaagccccctgaacaaacacagcttccggcccgaggcctcacctggacaacggtgcttccccaacagctgataccgccgtcctggggacttgggcttcttgccttcataaggcacagagcagatggagatgggacagtggagccagtttggttttctccctctgcactaggccaagaacttgctgccttgcctgtggggggtcccatccggcttcagagagctctggctggcattgaccatgggggaaagggctggtttcaggctgacatatggccgcaggtccagttcagcccaggtctctcatggttatcttccaacccactgtcacgctgacactatgctgccatgcctgggctgtggacctactgggcatttgaggaattggagaatggagatggcaagagggcaggcttttaagtttgggttggagacaacttcctgtggcccccacaagctgagtctggccttctccagctggccccaaaaaaggcctttgctacatcctgattatctctgaaagtaatcaatcaagtggctccagtagctctggattttctgccagggctgggccattgtggtgctgccccagtatgacatgggaccaaggccagcgcaggttatccacctctgcctggaagtctatactctacccagggcatccctctggtcagaggcagtgagtactgggaactggaggctgacctgtgcttagaagtcctttaatctgggctggtacaggcctcagccttgccctcaatgcacgaaaggtggcccaggagagaggatcaatgccacaggaggcagaagtctggcctctgtgcctctatggagactatcttccagttgctgctcaacagagttgttggctgagacctgcttgggagtctctgctggcccttcatctgttcaggaacacacacacacacacactcacacacgcacacacaatcacaatttgctacagcaacaaaaaagacattgggctgtggcattattaattaaagatgatatccagtctcc

SEQ ID NO: 22 - protein, 1352 aa, Artificial Sequence [sequence omitted]

SEQ ID NO: 23 - DNA, 750 bp, Artificial Sequence
  Description of Artifical Sequence:  Primer/Probe
ttcagtttgaacgggaggtttttgatccctttttttcagaatggattatttgctcatgattttctctctgctgtttgtggcttgccaaggagctccagaaacagcagtcttaggcgctgagctcagcgcggtgggtgagaacggcggggagaaacccactcccagtccaccctggcggctccgccggtccaagcgctgctcctgctcgtccctgatggataaagagtgtgtctacttctgccacctggacatcatttgggtcaacactcccgatttctttctctctttggataataggcacgttgttccgtatggacttggaagccctaggtccaagagagccttggagaatttacttcccacaaaggcaacagaccgtgagaatagatgccaatgtgctagccaaaaagacaagaagtgctggaatttttgccaagcaggaaaagaactcagggctgaagacattatggagaaagactggaataatcataagaaaggaaaagactgttccaagcttgggaaaaagtgtatttatcagcagttagtgagaggaagaaaaatcagaagaagttcagaggaacacctaagacaaaccaggtcggagaccatgagaaacagcgtcaaatcatcttttcatgatcccaagctgaaaggcaagccctccagagagcgttatgtgacccacaaccgagcacattggtgacagaccttcggggcctgtctgaagccatagcctccacggagagccct

SEQ ID NO: 24 - protein, 220 aa, Artificial Sequence
  Description of Artifical Sequence:  Domain
MDYLLMIFSLLFVACQGAPETAVLGAELSAVGENGGEKPTPSPPWRLRRSKRCSCSSLMDKECVYFCHLDIIWVNTPDFFLSLDNRHVVPYGLGSPRSKRALENLLPTKATDRENRCQCASQKDKKCWNFCQAGKELRAEDIMEKDWNNHKKGKDCSKLGKKCIYQQLVRGRKIRRSSEEHLRQTRSETMRNSVKSSFHDPKLKGKPSRERYVTHNRAHW

SEQ ID NO: 25 - DNA, 1076 bp, Artificial Sequence
  Description of Artifical Sequence:  Primer/Probe
ggctcctggtcccactgctgctcagcccagtggcctcacaggacaccagcttcccaggaggcgtctgacacagtatgatgatgaagatcccatggggcagcatcccagtactgatgttgctcctgctcctgggcctaatcgatatctcccaggcccagctcagctgcaccgggcccccagccatccctggcatcccgggtatccctgggacacctggccccgatggccaacctgggaccccagggataaaaggagagaaagggcttccagggctggctggagaccatggtgagttcggagagaagggagacccagggattcctgggaatccaggaaaagtcggccccaagggccccatgggccctaaaggtggcccaggggcccctggagccccaggccccaaaggtgaatcgggagactacaaggccacccagaaaatcgccttctctgccacaagaaccatcaacgtccccctgcgccgggaccagaccatccgcttcgaccacgtgatcaccaacatgaacaacaattatgagccccgcagtggcaagttcacctgcaaggtgcccggtctctactacttcacctaccacgccagctctcgagggaacctgtgcgtgaacctcatgcgtggccgggagcgtgcacagaaggtggtcaccttctgtgactatgcctacaacaccttccaggtcaccaccggtggcatggtcctcaagctggagcagggggagaacgtcttcctgcaggccaccgacaagaactcactactgggcatggagggtgccaacagcatcttttccgggttcctgctctttccagatatggaggcctgacctgtgggctgcttcacatccaccccggctccccctgccagcaacgctcactctacccccaacaccaccccttgcccagccaatgcacacagtagggcttggtgaatgctgctgagtgaatgagtaaataaactcttcaaggccaagggaaaaaaaaaaaaaaaaaaaaaaaaaaaaaaaaaaaaaaaaaaaaaaaaaaaaaaaaaaaaaaaaaaaaaaaaaaaaaaaaaaaaaaaaaaa

SEQ ID NO: 26 - protein, 253 aa, Artificial Sequence
  Description of Artifical Sequence:  Domain
MMMKIPWGSIPVLMLLLLLGLIDISQAQLSCTGPPAIPGIPGIPGTPGPDGQPGTPGIKGEKGLPGLAGDHGEFGEKGDPGIPGNPGKVGPKGPMGPKGGPGAPGAPGPKGESGDYKATQKIAFSATRTINVPLRRDQTIRFDHVITNMNNNYEPRSGKFTCKVPGLYYFTYHASSRGNLCVNLMRGRERAQKVVTFCDYAYNTFQVTTGGMVLKLEQGENVFLQATDKNSLLGMEGANSIFSGFLLFPDMEA

SEQ ID NO: 27 - DNA, 816 bp, Artificial Sequence
  Description of Artifical Sequence:  Primer/Probe
gtggtaaccttcacattgtcttctccacaggaggcgtctgacacagtatgatgatgaagatcccatggggcagcatcccagtactgatgttgctcctgctcctgggcctaatcgatatctcccaggcccagctcagctgcaccgggcccccagccatccctggcatcccgggtatccctgggacacctggccccgatggccaacctgggaccccagggataaaaggagagaaagggcttccagggctggctggagaccatggtgagttcggagagaagggagacccagggattcctgggaatccaggaaaagtcggccccaagggccccatgggccctaaaggtggcccaggggcccctggagccccaggccccaaaggtgaatcgggagactacaaggccacccagaaaatcgccttctctgccacaagaaccatcaacgtccccctgcgccgggaccagaccatccgcttcgaccacgtgatcaccaacatgaacaacaattatgagccccgcagtggcaagttcacctgcaaggtgcccggtctctactacttcacctaccacgccagctctcgagggaacctgtgcgtgaacctcatgcgtggccgggagcgtgcacagaaggtggtcaccttctgtgactatgcctacaacaccttccaggtcaccaccggtggcatggtcctcaagctggagcagggggagaacgtcttcctgcaggccaccgacaagaactcactactgggcatggagggtgccaacagcatcttttccgggttcctgctctttccagatatggaggcctgacctgtgg

SEQ ID NO: 28 - protein, 253 aa, Artificial Sequence; identical to SEQ ID NO: 26
  Description of Artifical Sequence:  Domain

SEQ ID NO: 29 - DNA, 1076 bp, Artificial Sequence
  Description of Artifical Sequence:  Primer/Probe
ggctcctggtcccactgctgctcagcccagtggcctcacaggacaccagcttcccaggaggcgtctgacacagtatgatgatgaagatcccatggggcagcatcccagtactgatgttgctcctgctcctgggcctaatcgatatctcccaggcccagctcagctgcaccgggcccccagccatccctggcatcccgggtatccctgggacacctggccccgatggccaacctgggaccccagggataaaaggagagaaagggcttccagggctggctggagaccatggtgagttcggagataagggagacccagggattcctgggaatccaggaaaagtcggccccaagggccccatgggccctaaaggtggcccaggggcccctggagccccaggccccaaaggtgaatcgggagactacaaggccacccagaaaatcgccttctctgccacaagaaccatcaacgtccccctgcgccgggaccagaccatccgcttcgaccacgtgatcaccaacatgaacaacaattatgagccccgcagtggcaagttcacctgcaaggtgcccggtctctactacttcacctaccacgccagctctcgagggaacctgtgcgtgaacctcatgcgtggccgggagcgtgcacagaaggtggtcaccttctgtgactatgcctacaacaccttccaggtcaccaccggtggcatggtcctcaagctggagcagggggagaacgtcttcctgcaggccaccgacaagaactcactactgggcatggagggtgccaacagcatcttttccgggttcctgctctttccagatatggaggcctgacctgtgggctgcttcacatccaccccggctccccctgccagcaacgctcactctacccccaacaccaccccttgcccagccaatgcacacagtagggcttggtgaatgctgctgagtgaatgagtaaataaactcttcaaggccaagggaaaaaaaaaaaaaaaaaaaaaaaaaaaaaaaaaaaaaaaaaaaaaaaaaaaaaaaaaaaaaaaaaaaaaaaaaaaaaaaaaaaaaaaaaaa

SEQ ID NO: 30 - protein, 253 aa, Artificial Sequence
  Description of Artifical Sequence:  Domain
MMMKIPWGSIPVLMLLLLLGLIDISQAQLSCTGPPAIPGIPGIPGTPGPDGQPGTPGIKGEKGLPGLAGDHGEFGDKGDPGIPGNPGKVGPKGPMGPKGGPGAPGAPGPKGESGDYKATQKIAFSATRTINVPLRRDQTIRFDHVITNMNNNYEPRSGKFTCKVPGLYYFTYHASSRGNLCVNLMRGRERAQKVVTFCDYAYNTFQVTTGGMVLKLEQGENVFLQATDKNSLLGMEGANSIFSGFLLFPDMEA

SEQ ID NO: 31 - DNA, 1076 bp, Artificial Sequence
  Description of Artifical Sequence:  Primer/Probe
ggctcctggtcccactgctgctcagcccagtggcctcacaggacaccagcttcccaggaggcgtctgacacagtatgatgatgaagatcccatggggcagcatcccagtactgatgttgctcctgctcctgggcctaatcgatatctcccaggcccagctcagctgcaccgggcccccagccatccctggcatcccgggtatccctgggacacctggccccgatggccaacctgggaccccagggataaaaggagagaaagggcttccagggctggctggagaccatggtgagttcggagagaagggagacccagggattcctgggaatccaggaaaagtcggccccaagggccccatgggccctaaaggtggcccaggggcccctggagccccaggccccaaaggtgaatcgggagactacaaggccacccggaaaatcgccttctctgccacaagaaccatcaacgtccccctgcgccgggaccagaccatccgcttcgaccacgtgatcaccaacatgaacaacaattatgagccccgcagtggcaagttcacctgcaaggtgcccggtctctactacttcacctaccacgccagctctcgagggaacctgtgcgtgaacctcatgcgtggccgggagcgtgcacagaaggtggtcaccttctgtgactatgcctacaacaccttccaggtcaccaccggtggcatggtcctcaagctggagcagggggagaacgtcttcctgcaggccaccgacaagaactcactactgggcatggagggtgccaacagcatcttttccgggttcctgctctttccagatatggaggcctgacctgtgggctgcttcacatccaccccggctccccctgccagcaacgctcactctacccccaacaccaccccttgcccagccaatgcacacagtagggcttggtgaatgctgctgagtgaatgagtaaataaactcttcaaggccaagggaaaaaaaaaaaaaaaaaaaaaaaaaaaaaaaaaaaaaaaaaaaaaaaaaaaaaaaaaaaaaaaaaaaaaaaaaaaaaaaaaaaaaaaaaaa

SEQ ID NO: 32 - protein, 253 aa, Artificial Sequence
  Description of Artifical Sequence:  Domain
MMMKIPWGSIPVLMLLLLLGLIDISQAQLSCTGPPAIPGIPGIPGTPGPDGQPGTPGIKGEKGLPGLAGDHGEFGEKGDPGIPGNPGKVGPKGPMGPKGGPGAPGAPGPKGESGDYKATRKIAFSATRTINVPLRRDQTIRFDHVITNMNNNYEPRSGKFTCKVPGLYYFTYHASSRGNLCVNLMRGRERAQKVVTFCDYAYNTFQVTTGGMVLKLEQGENVFLQATDKNSLLGMEGANSIFSGFLLFPDMEA

SEQ ID NO: 33 - DNA, 1628 bp, Artificial Sequence
  Description of Artifical Sequence:  Primer/Probe
atgaaccggaaagcgcggcgctgcctgggccacctctttctcagcctgggcatggtctgtctcctagcatgtggcttctcctcagtggtagctctgggcgcaacggtcatctgtaacaagatcccaggcctggctcccagacagcgggcgatctgccagagccggcccgacgccatcatcgtcataggagaaggctcacaaatgggcctggacgagtgtcagtttcagttccgcaatggccgctggaactgctctgcactgggagagcgcaccgtcttcgggaaggagctcaaagtggggagccgggacggtgcgttcacctacgccatcattgccgccggcgtggcccacgccatcacagctgcctgtacccatggcaacctgagcgactgtggctgcgacaaagagaagcaaggccagtaccaccgggacgagggctggaagtggggtggctgctctgccgacatccgctacggcatcggcttcgccaaggtcttcgtggacgctcgggagatcatgaagaacgcgcggcgcctcatgaacctgcataacaatgaggccggcaggaaggttctagaggaccggatgcagctggagtgcaagtgccacggcgtgtctggctcctgcaccaccaaaacctgctggaccacgctgcccaagttccgagaggtgggccacctgctgaaggagaagtacaacgcggccgtgcaggtggaggtggtgcgggccagccgtctgcggcagcccaccttcctgcgcatcaaacagctgcgcagctatcgcaagcccatgaagacggacctggtgtacatcgagaagtcgcccaactactgcgaggaggacccggtgaccggcagtgtgggcacgcagggccgcgcctgcaacaagacggctccccaggccagcggctgtgacctcatgtgctgtgggcgtggctacaacacccaccagtacgcccgcgtgtggcagtgcaactgtaagttccactggtgctgctatgtcaagtgcaacacgtgcagcgagcgcacggagatgtacacgtgcaagtgagccccgtgtgcacaccaccctcccgctgcaagtcagattgctgggaggactggaccgtttccaagctgcgggctccctggcaggatgctgagcttgtcttttctgctgaggagggtacttttcctgggtttcctgcaggcatccgtgggggaaaaaaaatctctcagagccctcaactattctgttccacacccaatgctgctccaccctcccccagacacagcccaggtccctccgcggctggagcgaagccttctgcagcaggaactctggacccctgggcctcatcacagcaatatttaacaatttattctgataaaaataatattaatttatttaattaaaaagaattcttccacctcgtcgggatccgttttctgcaatcaaagtggactgcttgctttcctagcaggatgattttgttgctaggacaaggagccgtgtagaagtgtacataactattctttatgcagatatttctactagctgattttgcaggtacccaccttgcagcactagatgtttaagtacaagaggagacatcttttatgcatatatagatatacacacacgaaaaa

SEQ ID NO: 34 - protein, 349 aa, Artificial Sequence
  Description of Artifical Sequence:  Domain
MNRKARRCLGHLFLSLGMVCLLACGFSSVVALGATVICNKIPGLAPRQRAICQSRPDAIIVIGEGSQMGLDECQFQFRNGRWNCSALGERTVFGKELKVGSRDGAFTYAIIAAGVAHAITAACTHGNLSDCGCDKEKQGQYHRDEGWKWGGCSADIRYGIGFAKVFVDAREIMKNARRLMNLHNNEAGRKVLEDRMQLECKCHGVSGSCTTKTCWTTLPKFREVGHLLKEKYNAAVQVEVVRASRLRQPTFLRIKQLRSYRKPMKTDLVYIEKSPNYCEEDPVTGSVGTQGRACNKTAPQASGCDLMCCGRGYNTHQYARVWQCNCKFHWCCYVKCNTCSERTEMYTCK

SEQ ID NO: 35 - DNA, 966 bp, Artificial Sequence
  Description of Artifical Sequence:  Primer/Probe
agatctctgggcgcaacggtcatctgtaacaagatcccaggcctggctcccagacagcgggcgatctgccagagccggcccgacgccatcatcgtcataggagaaggctcacaaatgggcctggacgagtgtcagtttcagttccgcaatggccgctggaactgctctgcactgggagagcgcaccgtcttcgggaaggagctcaaagtggggagccgggaggctgcattcacctacgccatcattgccgccggcgtggcccacgccatcacagctgcctgtacccagggcaacctgagcgactgtggctgcgacaaagagaagcaaggccagtaccaccgggacgagggctggaagtggggtggctgctccgccgacatccgctacggcatcggcttcgccaaggtctttgtggatgcccgggagatcaagcagaatgcccggactctcatgaacttgcacaacaacgaggcaggccgaaagatcctggaggagaacatgaagctggaatgtaagtgccacggcgtgtcaggctcgtgcaccaccaagacgtgctggaccacactgccacagtttcgggagctgggctacgtgctcaaggacaagtacaacgaggccgttcacgtggagcctgtgcgtgccagccgcaacaagcggcccaccttcctgaagatcaagaagccactgtcgtaccgcaagcccatggacacggacctggtgtacatcgagaagtcgcccaactactgcgaggaggacccggtgaccggcagtgtgggcacccagggccgcgcctgcaacaagacggctccccaggccagcggctgtgacctcatgtgctgtgggcgtggctacaacacccaccagtacgcccgcgtgtggcagtgcaactgtaagttccactggtgctgctatgtcaagtgcaacacgtgcagcgagcgcacggagatgtacacgtgcaagctcgag

SEQ ID NO: 36 - protein, 322 aa, Artificial Sequence
  Description of Artifical Sequence:  Domain
RSLGATVICNKIPGLAPRQRAICQSRPDAIIVIGEGSQMGLDECQFQFRNGRWNCSALGERTVFGKELKVGSREAAFTYAIIAAGVAHAITAACTQGNLSDCGCDKEKQGQYHRDEGWKWGGCSADIRYGIGFAKVFVDAREIKQNARTLMNLHNNEAGRKILEENMKLECKCHGVSGSCTTKTCWTTLPQFRELGYVLKDKYNEAVHVEPVRASRNKRPTFLKIKKPLSYRKPMDTDLVYIEKSPNYCEEDPVTGSVGTQGRACNKTAPQASGCDLMCCGRGYNTHQYARVWQCNCKFHWCCYVKCNTCSERTEMYTCKLE

SEQ ID NO: 37 - DNA, 966 bp, Artificial Sequence
  Description of Artifical Sequence:  Primer/Probe
agatctctgggcgcaacggtcatctgtaacaagatcccaggcctggctcccagacagcgggcgatctgccagagccggcccgacgccatcatcgtcataggagaaggctcacaaatgggcctggacgagtgtcagtttcagttccgcaatggccgctggaactgctctgcactgggagagcgcaccgtcttcgggaaggagctcaaagtggggagccgggaggctgcgttcacctacgccatcattgccgccggcgtggcccacgccatcacagctgcctgtacccagggcaacctgagcgactgtggctgcgacaaagagaagcaaggccagtaccaccgggacgagggctggaagtggggtggctgctctgccgacatccgctacggcatcggcttcgccaaggtctttgtggatgcccgggagatcaagcagaatgcccggactctcatgaacttgcacaacaacgaggcaggccgaaagatcctggaggagaacatgaagctggaatgtaagtgccacggcgtgtcaggctcgtgcaccaccaagacgtgctggaccacactgccacagtttcgggagctgggctacgtgctcaaggacaagtacaacgaggccgttcacgtggagcctgtgcgtgccagccgcaacaagcggcccaccttcctgaagatcaagaagccactgtcgtaccgcaagcccatggacacggacctggtgtacatcgagaagtcgcccaactactgcgaggaggacccggtgaccggcagtgtgggcacccagggccgcgcctgcaacaagacggctccccaggccagcggctgtgacctcatgtgctgtgggcgtggctacaacacccaccagtacgcccgcgtgtggcagtgcaactgtaagttccactggtgctgctatgtcaagtgcaacacgtgcagcgagcgcacggagatgtacacgtgcaagctcgag

SEQ ID NO: 38 - protein, 322 aa, Artificial Sequence; identical to SEQ ID NO: 36
  Description of Artifical Sequence:  Domain

SEQ ID NO: 39 - DNA, 966 bp, Artificial Sequence
  Description of Artifical Sequence:  Primer/Probe
agatctctgggcgcaacggtcatctgtaacaagatcccaggcctggctcccagacagcgggcgatctgccagagccggcccgacgccatcatcgtcataggagaaggctcacaaatgggcctggacgagtgtcagtttcagttccgcaatggccgctggaactgctctgcactgggagagcgcaccgtcttcgggaaggagctcaaagtggggagccgggaggctgcattcacctacgccatcattgccgccggcgtggcccacgccatcacagctgcctgtacccagggcaacctgagcgactgtggctgcgacaaagagaagcaaggccagtaccaccgggacgagggctggaagtggggtggctgctccgccgacatccgctacggcatcggcttcgccaaggtctttgtggatgcccgggagatcaagcagaatgcccggactctcatgaacttgcacaacaacgaggcaggccgaaagatcctggaggagaacatgaagctggaatgtaagtgccacggcgtgtcaggctcgtgcaccaccaagacgtgctggaccacactgccacagtttcgggagctgggctacgtactcaaggacaagtacaacgaggccgttcacgtggagcctgtgcgtgccagccgcaacaagcggcccaccttcctgaagatcaagaagccactgtcgtaccgcaagcccatggacacggacctggtgtacatcgagaagtcgcccaactactgcgaggaggacccggtgaccggcagtgtgggcacccagggccgcgcctgcaacaagacggctccccaggccagcggctgtgacctcatgtgctgtgggcgtggctacaacacccaccagtacgcccgcgtgtggcagtgcaactgtaagttccactggtgctgctatgtcaagtgcaacacgtgcagcgagcgcacggagatgtacacgtgcaagctcgag

SEQ ID NO: 40 - protein, 322 aa, Artificial Sequence; identical to SEQ ID NO: 36
  Description of Artifical Sequence:  Domain

SEQ ID NO: 41 - DNA, 966 bp, Artificial Sequence
  Description of Artifical Sequence:  Primer/Probe
agatctctgggcgcaacggtcatctgtaacaagatcccaggcctggctcccagacagcgggcgatctgccagagccggcccgacgccatcatcgtcataggagaaggctcacaaatgggcctggacgagtgtcagtttcagttccgcaatggccgctggaactgctctgcactgggagagcgcaccgtcttcgggaaggagctcaaagtggggagccgggaggctgcattcacctacgccatcattgccgccggcgtggtccacgccatcacagctgcctgtacccagggcaacctgagcgactgtggctgcgacaaagagaagcaaggccagtaccaccgggacgagggctggaagtggggtggctgctccgccgacatccgctacggcatcggcttcgccaaggtctttgtggatgcccgggagatcaagcagaatgcccggactctcatgaacttgcacaacaacgaggcaggccgaaagatcctggaggagaacatgaagctggaatgtaagtgccacggcgtgtcaggctcgtgcaccaccaagacgtgctggaccacactgccacagtttcgggagctgggctacgtgctcaaggacaagtacaacgaggccgttcacgtggagcctgtgcgtgccagccgcaacaagcggcccaccttcctgaagatcaagaagccactgtcgtaccgcaagcccatggacacggacctggtgtacatcgagaagtcgcccaactactgcgaggaggacccggtgaccggcagtgtgggcacccagggccgcgcctgcaacaagacggctccccaggccagcggctgtgacctcatgtgctgtgggcgtggctacaacacccaccagtacgcccgcgtgtggcagtgcaactgtaagttccactggtgctgctatgtcaagtgcaacacgtgcagcgagcgcacggagatgtacacgtgcaagctcgag

SEQ ID NO: 42 - protein, 322 aa, Artificial Sequence
  Description of Artifical Sequence:  Domain
RSLGATVICNKIPGLAPRQRAICQSRPDAIIVIGEGSQMGLDECQFQFRNGRWNCSALGERTVFGKELKVGSREAAFTYAIIAAGVVHAITAACTQGNLSDCGCDKEKQGQYHRDEGWKWGGCSADIRYGIGFAKVFVDAREIKQNARTLMNLHNNEAGRKILEENMKLECKCHGVSGSCTTKTCWTTLPQFRELGYVLKDKYNEAVHVEPVRASRNKRPTFLKIKKPLSYRKPMDTDLVYIEKSPNYCEEDPVTGSVGTQGRACNKTAPQASGCDLMCCGRGYNTHQYARVWQCNCKFHWCCYVKCNTCSERTEMYTCKLE

SEQ ID NO: 43 - DNA, 985 bp, Artificial Sequence
  Description of Artifical Sequence:  Primer/Probe
atctgcagaattcgcccttagatctctgggcgcaacggtcatctgtaacaagatcccaggcctggctcccagacagcgggcgatctgccagagccggcccgacgccatcatcgtcataggagaaggctcacaaatgggcctggacgagtgtcagtttcagttccgcaatggccgctggaactgctctgcactgggagagcgcaccgtcttcgggaaggagctcaaagtggggagccgggaggctgcgttcacctacgccatcattgccgccggcgtggcccacgccatcacagctgcctgtacccagggcaacctgagcgactgtggctgcgacaaagagaagcaaggccagtaccaccgggacgagggctggaagtggggtggctgctctgccgacatccgctacggcatcggcttcgccaaggtctttgtggatgcccgggagatcaagcagaatgcccggactctcatgaacttgcacaacaacgaggcaggccgaaagatcctggaggagaacatgaagctggaatgtaagtgccacggcgtgtcaggctcgtgcaccaccaagacgtgctggaccacactgccacagtttcgggagctgggctacgtgctcaaggacaagtacaacgaggccgttcacgtggagcctgtgcgtgccagccgcaacaagcggcccaccttcctgaagatcaagaagccactgtcgtaccgcaagcccatggacacggacctggtgtacatcgagaagtcgcccaactactgcgaggaggacccggtgaccggcagtgtgggcacccagggccgcgcctgcaacaagacggctccccaggccagcggctgtgacctcatgtgctgtgggcgtggctacaacacccaccagtacgcccgcgtgtggcagtgcaactgtaagttccactggtgctactatgtcaagtgcaacacgtgcagcgagcgcacggagatgtacacgtgcaagctcgag

SEQ ID NO: 44 - protein, 328 aa, Artificial Sequence
  Description of Artifical Sequence:  Domain
SAEFALRSLGATVICNKIPGLAPRQRAICQSRPDAIIVIGEGSQMGLDECQFQFRNGRWNCSALGERTVFGKELKVGSREAAFTYAIIAAGVAHAITAACTQGNLSDCGCDKEKQGQYHRDEGWKWGGCSADIRYGIGFAKVFVDAREIKQNARTLMNLHNNEAGRKILEENMKLECKCHGVSGSCTTKTCWTTLPQFRELGYVLKDKYNEAVHVEPVRASRNKRPTFLKIKKPLSYRKPMDTDLVYIEKSPNYCEEDPVTGSVGTQGRACNKTAPQASGCDLMCCGRGYNTHQYARVWQCNCKFHWCYYVKCNTCSERTEMYTCKLE

SEQ ID NO: 45 - DNA, 966 bp, Artificial Sequence
  Description of Artifical Sequence:  Primer/Probe
agatctctgggcgcaacggtcatctgtaacaagatcccaggcctggctcccagacagcgggcgatctgccagagccggcccgacgccatcatcgtcataggagaaggctcacaaatgggcctggacgagtgtcagtttcagttccgcaatggccgctggaactgctctgcactgggagagcgcaccgtcttcgggaaggagctcaaagtggggagccgggaggctgcgttcacctacgccatcattgccgccggcgtggcccacgccatcacagctgcctgtacccagggcaacctgagcgactgtgactgcgacaaagagaagcaaggccagtaccaccgggacgagggctggaagtggggtggctgctctgccgacatccgctacggcatcggcttcgccaaggtctttgtggatgcccgggagatcaagcagaatgcccggactctcatgaacttgcacaacaacgaggcaggccgaaagatcctggaggagaacatgaagctggaatgtaagtgccacggcgtgtcaggctcgtgcaccaccaagacgtgctggaccacactgccacagtttcgggagctgggctacgtgctcaaggacaagtacaacgaggccgttcacgtggagcctgtgcgtgccagccgcaacaagcggcccaccttcctgaagatcaagaagccactgtcgtaccgcaagcccatggacacggacctggtgtacatcgagaagtcgcccaactactgcgaggaggacccggtgaccggcagtgtgggcacccagggccgcgcctgcaacaagacggctccccaggccagcggctgtgacctcatgtgctgtgggcgtggctacaacacccaccagtacgcccgcgtgtggcagtacaactgtaagttccactggtgctgctatgtcaagtgcaacacgtgcagcgagcgcacggagatgtacacgtgcaagctcgag

SEQ ID NO: 46 - protein, 322 aa, Artificial Sequence
  Description of Artifical Sequence:  Domain
RSLGATVICNKIPGLAPRQRAICQSRPDAIIVIGEGSQMGLDECQFQFRNGRWNCSALGERTVFGKELKVGSREAAFTYAIIAAGVAHAITAACTQGNLSDCDCDKEKQGQYHRDEGWKWGGCSADIRYGIGFAKVFVDAREIKQNARTLMNLHNNEAGRKILEENMKLECKCHGVSGSCTTKTCWTTLPQFRELGYVLKDKYNEAVHVEPVRASRNKRPTFLKIKKPLSYRKPMDTDLVYIEKSPNYCEEDPVTGSVGTQGRACNKTAPQASGCDLMCCGRGYNTHQYARVWQYNCKFHWCCYVKCNTCSERTEMYTCKLE

SEQ ID NO: 47 - DNA, 966 bp, Artificial Sequence
  Description of Artifical Sequence:  Primer/Probe
agatctctgggcgcaacggtcatctgtaacaagatcccaggcctggctcccagacagcgggcgatctgccagagccggcccgacgccatcatcgtcataggagaaggctcacaaatgggcctggacgagtgtcagtttcagttccgcaatggccgctggaactgctctgcactgggagagcgcaccgtcttcgggaaggagctcaaagtggggagccgggaggctgcgttcacctacgccatcattgccgccggcgtggcccacgccatcacagctgcctgtacccagggcaacctgagcgactgtggctgcgacaaagagaagcaaggccagtaccaccgggacgagggctggaagtggggtggctgctctgccgacatccgctacggcatcggcttcgccaaggtctttgtggatgcccgggagatcaagcagaatgcccggactctcatgaacttgcacaacaacgaggcaggccgaaagatcctggaggagaacatgaagctggaatgtaagtgccacggcgtgtcaggctcgtgcaccaccaagacgtgctggaccacactgccacagtttcgggagctgggctacgtgctcaaggacaagtacaacgaggccgttcacgtggagcctgtgcgtgccagccgcaacaagcggcccaccttcctgaagatcaagaagccactgtcgtaccgcaagcccatggacacggacctggtgtacatcgagaagtcgaccaactgctgcgaggaggacccggtgaccggcagtgtgggcacccagggccgcgcctgcaacaagacggctccccaggccagcggctgtgacctcatgtgctgtgggcgtggctacaacacccaccagtacgcccgcgtgtggcagtgcaactgtaagttccactggtgctgctatgtcaagtgcaacacgtgcagcgagcgcacggagatgtacacgtgcaagctcgag

SEQ ID NO: 48 - protein, 322 aa, Artificial Sequence
  Description of Artifical Sequence:  Domain
RSLGATVICNKIPGLAPRQRAICQSRPDAIIVIGEGSQMGLDECQFQFRNGRWNCSALGERTVFGKELKVGSREAAFTYAIIAAGVAHAITAACTQGNLSDCGCDKEKQGQYHRDEGWKWGGCSADIRYGIGFAKVFVDAREIKQNARTLMNLHNNEAGRKILEENMKLECKCHGVSGSCTTKTCWTTLPQFRELGYVLKDKYNEAVHVEPVRASRNKRPTFLKIKKPLSYRKPMDTDLVYIEKSTNCCEEDPVTGSVGTQGRACNKTAPQASGCDLMCCGRGYNTHQYARVWQCNCKFHWCCYVKCNTCSERTEMYTCKLE

SEQ ID NO: 49 - DNA, 966 bp, Artificial Sequence
  Description of Artifical Sequence:  Primer/Probe
agatctctgggcgcaacggtcatctgtaacaagatcccaggcctggctcccagacagcgggcgatctgccagagccggcccgacgccatcatcgtcataggagaaggctcacaaatgggcctggacgagtgtcagtttcagttccgcaatggccgctggaactgctctgcactgggagagcgcaccgtcttcgggaaggagctcaaagtggggagccgggaggctgcgttcacctacgccatcattgccgccggcgtggcccacgccatcacagctgcctgtacccagggcaacctgagcgactgtggctgcgacaaagagaagcaaggccagtaccaccgggacgagggctggaagtggggtggctgctctgccgacatccgctacggcatcggcttcgccaaggtctttgtggatgcccgggagatcaagcagaatgcccggactctcatgaacttgcacaacaacgaggcaggccgaaagatcctggaggagaacatgaagctgggatgtaagtgccacggcgtgtcaggctcgtgcaccaccaagacgtgctggaccacactgccacagtttcgggagctgggctacgtgctcaaggacaagtacaacgaggccgttcacgtggagcctgtgcgtgccagccgcaacaagcggcccaccttcctgaagatcaagaagccactgtcgtaccgcaagcccatggacacggacctggtgtacatcgagaagtcgaccaactgctgcgaggaggacccggtgaccggcagtgtgggcacccagggccgcgcctgcaacaagacggctccccaggccagcggctgtgacctcatgtgctgtgggcgtggctacaacacccaccagtacgcccgcgtgtggcagtgcaactgtaagttccactggtgctgctatgtcaagtgcaacacgtgcagcgagcgcacggagatgtacacgtgcaagctcgag

SEQ ID NO: 50 - protein, 322 aa, Artificial Sequence
  Description of Artifical Sequence:  Domain
RSLGATVICNKIPGLAPRQRAICQSRPDAIIVIGEGSQMGLDECQFQFRNGRWNCSALGERTVFGKELKVGSREAAFTYAIIAAGVAHAITAACTQGNLSDCGCDKEKQGQYHRDEGWKWGGCSADIRYGIGFAKVFVDAREIKQNARTLMNLHNNEAGRKILEENMKLGCKCHGVSGSCTTKTCWTTLPQFRELGYVLKDKYNEAVHVEPVRASRNKRPTFLKIKKPLSYRKPMDTDLVYIEKSTNCCEEDPVTGSVGTQGRACNKTAPQASGCDLMCCGRGYNTHQYARVWQCNCKFHWCCYVKCNTCSERTEMYTCKLE

SEQ ID NO: 51 - DNA, 966 bp, Artificial Sequence; identical to SEQ ID NO: 37
  Description of Artifical Sequence:  Primer/Probe

SEQ ID NO: 52 - protein, 318 aa, Artificial Sequence
  Description of Artifical Sequence:  Domain
LGATVICNKIPGLAPRQRAICQSRPDAIIVIGEGSQMGLDECQFQFRNGRWNCSALGERTVFGKELKVGSREAAFTYAIIAAGVAHAITAACTQGNLSDCGCDKEKQGQYHRDEGWKWGGCSADIRYGIGFAKVFVDAREIKQNARTLMNLHNNEAGRKILEENMKLECKCHGVSGSCTTKTCWTTLPQFRELGYVLKDKYNEAVHVEPVRASRNKRPTFLKIKKPLSYRKPMDTDLVYIEKSPNYCEEDPVTGSVGTQGRACNKTAPQASGCDLMCCGRGYNTHQYARVWQCNCKFHWCCYVKCNTCSERTEMYTCK

SEQ ID NO: 53 - DNA, 1057 bp, Artificial Sequence
  Description of Artifical Sequence:  Primer/Probe
atgaaccggaaagcgcggcgctgcctgggccacctctttctcagcctgggcatggtctgtctcctagcatgtggcttctcctcagtggtagctctgggcgcaacggtcatctgtaacaagatcccaggcctggctcccagacagcgggcgatctgccagagccggcccgacgccatcatcgtcataggagaaggctcacaaatgggcctggacgagtgtcagtttcagttccgcaatggccgctggaactgctctgcactgggagagcgcaccgtcttcgggaaggagctcaaagtggggagccgggacggtgcgttcacctacgccatcattgccgccggcgtggcccacgccatcacagctgcctgtacccatggcaacctgagcgactgtggctgcgacaaagagaagcaaggccagtaccaccgggacgagggctggaagtggggtggctgctctgccgacatccgctacggcatcggcttcgccaaggtcttcgtggacgctcgggagatcatgaagaacgcgcggcgcctcatgaacctgcataacaatgaggccggcaggaaggttctagaggaccggatgcagctggagtgcaagtgccacggcgtgtctggctcctgcaccaccaaaacctgctggaccacgctgcccaagttccgagaggtgggccacctgctgaaggagaagtacaacgcggccgtgcaggtggaggtggtgcgggccagccgtctgcggcagcccaccttcctgcgcatcaaacagctgcgcagctatcgcaagcccatgaagacggacctggtgtacatcgagaagtcgcccaactactgcgaggaggacccggtgaccggcagtgtgggcacgcagggccgcgcctgcaacaagacggctccccaggccagcggctgtgacctcatgtgctgtgggcgtggctacaacacccaccagtacgcccgcgtgtggcagtgcaactgtaagttccactggtgctgctatgtcaagtgcaacacgtgcagcgagcgcacggagatgtacacgtgcaagtgagccccgt

SEQ ID NO: 54 - protein, 349 aa, Artificial Sequence; identical to SEQ ID NO: 34
  Description of Artifical Sequence:  Domain

SEQ ID NO: 55 - DNA, 1628 bp, Artificial Sequence
  Description of Artifical Sequence:  Primer/Probe
atgaaccggaaagcgcggcgctgcctgggccacctctttctcagcctgggcatggtctgtctcctagcatgtggcttctcctcagtggtagctctgggcgcaacggtcatctgtaacaagatcccaggcctggctcccagacagcgggcgatctgccagagccggcccgacgccatcatcgtcataggagaaggctcacaaatgggcctggacgagtgtcagtttcagttccgcaatggccgctggaactgctctgcactgggagagcgcaccgtcttcgggaaggagctcaaagtggggagccgggacggtgcgttcacctacgccatcattgccgccggcgtggcccacgccatcacagctgcctgtacccatggcaacctgagcgactgtggctgcgacaaagagaagcaaggccagtaccaccgggacgagggctggaagtggggtggctgctctgccgacatccgctacggcatcggcttcgccaaggtcttcgtggacgctcgggagatcatgaagaacgcgcggcgcctcatgaacctgcataacaatgaggccggcaggaaggttctagaggaccggatgcagctggagtgcaagtgccacggcgtgtctggctcctgcaccaccaaaacctgctggaccacgctgcccaagttccgagaggtgggccacctgctgaaggagaagtacaacgcggccgtgcaggtggaggtggtgcgggccagccgtctgcggcagcccaccttcctgcgcatcaaacagctgcgcagctatcgcaagcccatgaagacggacctggtgtacatcgagaagtcgcccaactactgcgaggaggacccggtgaccggcagtgtgggcacgcagggccgcgcctgcaacaagacggctccccaggccagcggctgtgacctcatgtgctgtgggcgtggctacaacacccaccattacgcccgcgtgtggcagtgcaactgtaagttccactggtgctgctatgtcaagtgcaacacgtgcagcgagcgcacggagatgtacacgtgcaagtgagccccgtgtgcacaccaccctcccgctgcaagtcagattgctgggaggactggaccgtttccaagctgcgggctccctggcaggatgctgagcttgtcttttctgctgaggagggtacttttcctgggtttcctgcaggcatccgtgggggaaaaaaaatctctcagagccctcaactattctgttccacacccaatgctgctccaccctcccccagacacagcccaggtccctccgcggctggagcgaagccttctgcagcaggaactctggacccctgggcctcatcacagcaatatttaacaatttattctgataaaaataatattaatttatttaattaaaaagaattcttccacctcgtcgggatccgttttctgcaatcaaagtggactgcttgctttcctagcaggatgattttgttgctaggacaaggagccgtgtagaagtgtacataactattctttatgcagatatttctactagctgattttgcaggtacccaccttgcagcactagatgtttaagtacaagaggagacatcttttatgcatatatagatatacacacacgaaaaa

SEQ ID NO: 56 - protein, 349 aa, Artificial Sequence
  Description of Artifical Sequence:  Domain
MNRKARRCLGHLFLSLGMVCLLACGFSSVVALGATVICNKIPGLAPRQRAICQSRPDAIIVIGEGSQMGLDECQFQFRNGRWNCSALGERTVFGKELKVGSRDGAFTYAIIAAGVAHAITAACTHGNLSDCGCDKEKQGQYHRDEGWKWGGCSADIRYGIGFAKVFVDAREIMKNARRLMNLHNNEAGRKVLEDRMQLECKCHGVSGSCTTKTCWTTLPKFREVGHLLKEKYNAAVQVEVVRASRLRQPTFLRIKQLRSYRKPMKTDLVYIEKSPNYCEEDPVTGSVGTQGRACNKTAPQASGCDLMCCGRGYNTHHYARVWQCNCKFHWCCYVKCNTCSERTEMYTCK

SEQ ID NO: 57 - DNA, 993 bp, Artificial Sequence
  Description of Artifical Sequence:  Primer/Probe
ctgaccgggcgggaagtcctgacgcccttcccaggattgggcactgcggcagccccggcacagggcggggcccacctgaagcagtgtgacctgctgaagctgtcccggcggcagaagcagctctgccggagggagcccggcctggctgagaccctgagggatgctgcgcacctcggcctgcttgagtgccagtttcagttccggcatgagcgctggaactgtagcctggagggcaggacgggcctgctcaagagaggcttcaaagagacagctttcctgtacgcggtgtcctctgccgccctcacccacaccctggcccgggcctgcagcgctgggcgcatggagcgctgcacctgtgatgactctccggggctggagagccgacaggcctggcaatggggcgtgtgcggtgacaacctcaagtacagcaccaagtttctgagcaacttcctggggtccaagagaggaaacaaggacctgcgggcacgggcagacgcccacaatacccacgtgggcatcaaggctgtgaagagtggcctcaggaccacgtgtaagtgccatggcgtatcaggctcctgtgccgtgcgcacctgctggaagcagctctccccgttccgtgagacgggccaggtgctgaaactgcgctatgactcggctgtcaaggtgtccagtgccaccaatgaggccttgggccgcctagagctgtgggcccctgccaggcagggcagcctcaccaaaggcctggccccaaggtctggggacctggtgtacatggaggactcacccagcttctgccggcccagcaagtactcacctggcacagcaggtagggtgtgctcccgggaggccagctgcagcagcctgtgctgcgggcggggctatgacacccagagccgcctggtggccttctcctgccactgccaggtgcagtggtgctgctacgtggagtgccagcaatgtgtgcaggaggagcttgtgtacacctgcaagcac

SEQ ID NO: 58 - protein, 331 aa, Artificial Sequence
  Description of Artifical Sequence:  Domain
LTGREVLTPFPGLGTAAAPAQGGAHLKQCDLLKLSRRQKQLCRREPGLAETLRDAAHLGLLECQFQFRHERWNCSLEGRTGLLKRGFKETAFLYAVSSAALTHTLARACSAGRMERCTCDDSPGLESRQAWQWGVCGDNLKYSTKFLSNFLGSKRGNKDLRARADAHNTHVGIKAVKSGLRTTCKCHGVSGSCAVRTCWKQLSPFRETGQVLKLRYDSAVKVSSATNEALGRLELWAPARQGSLTKGLAPRSGDLVYMEDSPSFCRPSKYSPGTAGRVCSREASCSSLCCGRGYDTQSRLVAFSCHCQVQWCCYVECQQCVQEELVYTCKH

SEQ ID NO: 59 - DNA, 928 bp, Artificial Sequence
  Description of Artifical Sequence:  Primer/Probe
caccggatcccagtgtgacctgctgaagctgtcccggcggcagaagcagctctgccggagggagcccggcctggctgagaccctgagggatgctgcgcacctcggcctgcttgagtgccagtttcagttccggcatgagcgctggaactgtagcctggagggcaggacgggcctgctcaagagaggcttcaaagagacagctttcctgtacgcggtgtcctctgccgccctcacccacaccctggcccgggcctgcagcgctgggcgcatggagcgctgcacctgtgatgactctccggggctggagagccggcaggcctggcagtggggcgtgtgcggtgacaacctcaagtacagcaccaagtttctgagcaacttcctggggtccaagagaggaaacaaggacctgcgggcacgggcagacgcccacaatacccacgtgggcatcaaggctgtgaagagtggcctcaggaccacgtgtaagtgccatggcgtatcaggctcctgtgccgtgcgcacctgctggaagcagctctccccgttccgtgagacgggccaggtgctgaaactgcgctatgactcggctgtcaaggtgtccagtgccaccaatgaggccttgggccgcctagagctgtgggcccctgccaggcagggcagcctcaccaaaggcctggccccaaggtctggggacctggtgtacatggaggactcacccagcttctgccggcccagcaagtactcacctggcacagcaggtagggtgtgctcccgggaggccagctgcagcagcctgtgctgcgggcggggctatgacacccagagccgcctggtggccttctcctgccactgccaggtgcagtggtgctgctacgtggagtgccagcaatgtgtgcaggaggagcttgtgtacacctgcaagctcgagggc

SEQ ID NO: 60 - protein, 309 aa, Artificial Sequence
  Description of Artifical Sequence:  Domain
TGSQCDLLKLSRRQKQLCRREPGLAETLRDAAHLGLLECQFQFRHERWNCSLEGRTGLLKRGFKETAFLYAVSSAALTHTLARACSAGRMERCTCDDSPGLESRQAWQWGVCGDNLKYSTKFLSNFLGSKRGNKDLRARADAHNTHVGIKAVKSGLRTTCKCHGVSGSCAVRTCWKQLSPFRETGQVLKLRYDSAVKVSSATNEALGRLELWAPARQGSLTKGLAPRSGDLVYMEDSPSFCRPSKYSPGTAGRVCSREASCSSLCCGRGYDTQSRLVAFSCHCQVQWCCYVECQQCVQEELVYTCKLEG

SEQ ID NO: 61 - DNA, 1464 bp, Artificial Sequence
  Description of Artifical Sequence:  Primer/Probe
gcgaggagatgctagagggcgcagcgccgccagcaccatgcgccccccgcccgcgctggccctggccgggctctgcctgctggcgctgcccgccgccgccgcctcctacttcggcctgaccgggcgggaagtcctgacgcccttcccaggattgggcactgcggcagccccggcacagggcggggcccacctgaagcagtgtgacctgctgaagctgtcccggcggcagaagcagctctgccggagggagcccggcctggctgagaccctgagggatgctgcgcacctcggcctgcttgagtgccagtttcagttccggcatgagcgctggaactgtagcctggagggcaggacgggcctgctcaagagaggcttcaaagagacagctttcctgtacgcggtgtcctctgccgccctcacccacaccctggcccgggcctgcagcgctgggcgcatggagcgctgcacctgtgatgactctccggggctggagagccggcaggcctggcagtggggcgtgtgcggtgacaacctcaagtacagcaccaagtttctgagcaacttcctggggtccaagagaggaaacaaggacctgcgggcacgggcagacgcccacaatacccacgtgggcatcaaggctgtgaagagtggcctcaggaccacgtgtaagtgccatggcgtatcaggctcctgtgccgtgcgcacctgctggaagcagctctccccgttccgtgagacgggccaggtgctgaaactgcgctatgactcggctgtcaaggtgtccagtgccaccaatgaggccttgggccgcctagagctgtgggcccctgccaggcagggcagcctcaccaaaggcctggccccaaggtctggggacctggtgtacatggaggactcacccagcttctgccggcccagcaagtactcacctggcacagcaggtagggtgtgctcccgggaggccagctgcagcagcctgtgctgcgggcggggctatgacacccagagccgcctggtggccttctcctgccactgccaggtgcagtggtgctgctacgtggagtgccagcaatgtgtgcaggaggagcttgtgtacacctgcaagcactaggcctactgcccagcaagccagtctggcactgccaggacctcctgtggcacccttcaagctgcccagccggccctctgggcagactgtcatcacatgcatgcataaaccggcatgtgtgccaatgcacacgagtgtgccactcaccaccattccttggccagccttttgcctccctcgatactcaacaaagagaagcaaagcctcctcccttaacccaagcatccccaaccttgttgaggacttggagaggagggcagagtgagaaagacatggagggaaataagggagaccaagagcacagcaggactgaaattttggacgggagagaggggctattccatcttgcttcctgg

SEQ ID NO: 62 - protein, 357 aa, Artificial Sequence [sequence omitted]

SEQ ID NO: 63 - DNA, 1093 bp, Artificial Sequence
  Description of Artifical Sequence:  Primer/Probe
caccggatccaccatgcgccccccgcccgcgctggccctggccgggctctgcctgctggcgctgcccgccgccgccgcctcctacttcggcctgaccgggcgggaagtcctgacgcccttcccaggattgggcactgcggcagccccggcacagggcggggcccacctgaagcagtgtgacctgctgaagctgtcccggcggcagaagcagctctgccggagggagcccggcctggctgagaccctgagggatgctgcgcacctcggcctgcttgagtgccagtttcagttccggcatgagcgctggaactgtagcctggagggcaggacgggcctgctcaagagaggcttcaaagagacagctttcctgtacgcggtgtcctctgccgccctcacccacaccctggcccgggcctgcagcgctgggcgcatggagcgctgcacctgtgatgactctccggggctggagagccggcaggcctggcagtggggcgtgtgcggtgacaacctcaagtacagcaccaagtttctgagcaacttcctggggtccaagagaggaaacaaggacctgcgggcacgggcagacgcccacaatacccacgtgggcatcaaggctgtgaagagtggcctcaggaccacgtgtaagtgccatggcgtatcaggctcctgtgccgtgcgcacctgctggaagcagctctccccgttccgtgagacgggccaggtgctgaaactgcgctatgactcggctgtcaaggtgtccagtgccaccaatgaggccttgggccgcctagagctgtgggcccctgccaggcagggcagcctcaccaaaggcctggccccaaggtctggggacctggtgtacatggaggactcacccagcttctgccggcccagcaagtactcacctggcacagcaggtagggtgtgctcccgggaggccagctgcagcagcctgtgctgcgggcggggctatgacacccagagccgcctggtggccttctcctgccactgccaggtgcagtggtgctgctacgtggagtgccagcaatgtgtgcaggaggagcttgtgtacacctgcaagcacctcgagggc

SEQ ID NO: 64 - protein, 364 aa, Artificial Sequence
  Description of Artifical Sequence:  Domain
TGSTMRPPPALALAGLCLLALPAAAASYFGLTGREVLTPFPGLGTAAAPAQGGAHLKQCDLLKLSRRQKQLCRREPGLAETLRDAAHLGLLECQFQFRHERWNCSLEGRTGLLKRGFKETAFLYAVSSAALTHTLARACSAGRMERCTCDDSPGLESRQAWQWGVCGDNLKYSTKFLSNFLGSKRGNKDLRARADAHNTHVGIKAVKSGLRTTCKCHGVSGSCAVRTCWKQLSPFRETGQVLKLRYDSAVKVSSATNEALGRLELWAPARQGSLTKGLAPRSGDLVYMEDSPSFCRPSKYSPGTAGRVCSREASCSSLCCGRGYDTQSRLVAFSCHCQVQWCCYVECQQCVQEELVYTCKHLEG

SEQ ID NO: 65 - DNA, 1024 bp, Artificial Sequence
  Description of Artifical Sequence:  Primer/Probe
aaccggatcctcctacttcggcctgaccgggcgggaagtcctgacgcccttcccaggattgggcactgcggcagccccggcacagggcggggcccacctgaagcagtgtgacctgctgaagctgtcccggcggcagaagcagctctgccggagggagcccggcctggctgagaccctgagggatgctgcgcacctcggcctgcttgagtgccagtttcagttccggcatgagcgctggaactgtagcctggagggcaggacgggcctgctcaagagaggcttcaaagagacagctttcctgtacgcggtgtcctctgccgccctcacccacaccctggcccgggcctgcagcgctgggcgcatggagcgctgcacctgtgatgactctccggggctggagagccggcaggcctggcagtggggcgtgtgcggtgacaacctcaagtacagcaccaagtttctgagcaacttcctggggtccaagagaggaaacaaggacctgcgggcacgggcagacgcccacaatacccacgtgggcatcaaggctgtgaagagtggcctcaggaccacgtgtaagtgccatggcgtatcaggctcctgtgccgtgcgcacctgctggaagcagctctccccgttccgtgagacgggccaggtgctgaaactgcgctatgactcggctgtcaaggtgtccagtgccaccaatgaggccttgggccgcctagagctgtgggcccctgccaggcagggcagcctcaccaaaggcctggccccaaggtctggggacctggtgtacatggaggactcacccagcttctgccggcccagcaagtactcacctggcacagcaggtagggtgtgctcccgggaggccagctgcagcagcctgtgctgcgggcggggctatgacacccagagccgcctggtggccttctcctgccactgccaggtgcagtggtgctgctacgtggagtgccagcaatgtgtgcaggaggagcttgtgtacacctgcaagcacctcgagggc

SEQ ID NO: 66 - protein, 341 aa, Artificial Sequence
  Description of Artifical Sequence:  Domain
TGSSYFGLTGREVLTPFPGLGTAAAPAQGGAHLKQCDLLKLSRRQKQLCRREPGLAETLRDAAHLGLLECQFQFRHERWNCSLEGRTGLLKRGFKETAFLYAVSSAALTHTLARACSAGRMERCTCDDSPGLESRQAWQWGVCGDNLKYSTKFLSNFLGSKRGNKDLRARADAHNTHVGIKAVKSGLRTTCKCHGVSGSCAVRTCWKQLSPFRETGQVLKLRYDSAVKVSSATNEALGRLELWAPARQGSLTKGLAPRSGDLVYMEDSPSFCRPSKYSPGTAGRVCSREASCSSLCCGRGYDTQSRLVAFSCHCQVQWCCYVECQQCVQEELVYTCKHLEG

SEQ ID NO: 67 - DNA, 1021 bp, Artificial Sequence
  Description of Artifical Sequence:  Primer/Probe
tcctgaccgggcgggaagtcctgacgcccttcccaggattgggcactgcggcagccccggcacagggcggggcccacctgaagcagtgtgacctgctgaagctgtcccggcggcagaagcagctctgccggagggagcccggcctggctgagaccctgagggatgctgcgcacctcggcctgcttgagtgccagtttcagttccggcatgagcgctggaactgtagcctggagggcaggatgggcctgctcaagagaggcttcaaagagacagctttcctgtacgcggtgtcctctgccgccctcacccacaccctggcccgggcctgcagcgctgggcgcatggagcgctgcacctgtgatgactctccggggctggagagccggcaggcctggcagtggggcgtgtgcggtgacaacctcaagtacagcaccaagtttctgagcaacttcctggggtccaagagaggaaacaaggacctgcgggcacgggcagacgcccacaatacccacgtgggcatcaaggctgtgaagagtggcctcaggaccacgtgtaagtgccatggcgtatcaggctcctgtgccgtgcgcacctgctggaagcagctctccccgttccgtgagacgggccaggtgctgaaactgcgctatgactcggctgtcaaggtgtccagtgccaccaatgaggccttgggccgcctagagctgtgggcccctgccaggcagggcagcctcaccaaaggcctggccccaaggtctggggacctggtgtacatggaggactcacccagcttctgccggcccagcaagtactcacctggcacagcaggtagggtgtgctcccgggaggccagctgcagcagcctgtgctgcgggcggggctatgacacccagagccgcctggtggccttctcctgccactgccaggtgcagtggtgctgctacgtggagtgccagcaatgtgtgcaggaggagcttgtgtacacctgcaagcactaggcctactgcccagcaagccagtc

SEQ ID NO: 68 - protein, 331 aa, Artificial Sequence
  Description of Artifical Sequence:  Domain
LTGREVLTPFPGLGTAAAPAQGGAHLKQCDLLKLSRRQKQLCRREPGLAETLRDAAHLGLLECQFQFRHERWNCSLEGRMGLLKRGFKETAFLYAVSSAALTHTLARACSAGRMERCTCDDSPGLESRQAWQWGVCGDNLKYSTKFLSNFLGSKRGNKDLRARADAHNTHVGIKAVKSGLRTTCKCHGVSGSCAVRTCWKQLSPFRETGQVLKLRYDSAVKVSSATNEALGRLELWAPARQGSLTKGLAPRSGDLVYMEDSPSFCRPSKYSPGTAGRVCSREASCSSLCCGRGYDTQSRLVAFSCHCQVQWCCYVECQQCVQEELVYTCKH

SEQ ID NO: 69 - DNA, 933 bp, Artificial Sequence
  Description of Artifical Sequence:  Primer/Probe
ggggcccacctgaagcagtgtgacctgctgaagctgtcccggcggcagaagcagctctgccggagggagcccggcctggctgagaccctgagggatgctgcgcacctcggcctgcttgagtgccagtttcagttccggcatgagcgctggaactgtagcctggagggcaggacgggcctgctcaagagaggcttcaaagagacagctttcctgtacgcggtgtcctctgccgccctcacccacaccctggcccgggcctgcagcgctgggcgcatggagcgctgcacctgtgatgactctccggggctggagagccggcaggcctggcagtggggcgtgtgcggtgacaacctcaagtacagcaccaagtttctgagcaacttcctggggtccaagagaggaaacaaggacctgcgggcacgggcagacgcccacaatacccacgtgggcatcaaggctgtgaagagtggcctcaggaccacgtgtaagtgccatggcgtatcaggctcctgtgccgtgcgcacctgctggaagcagctctccccgttccgtgagacgggccaggtgctgaaactgcgctatgactcggctgtcaaggtgtccagtgccaccaatgaggccttgggccgcctagagctgtgggcccctgccaggcagggcagcctcaccaaaggcctggccccaaggtctggggacctggtgtacatggaggactcacccagcttctgccggcccagcaagtactcacctggcacagcaggtagggtgtgctcccgggaggccagctgcagcagcctgtgctgcgggcggggctatgacacccagagccgcctggtggccttctcctgccactgccaggtgcagtggtgctgctacgtggagtgccagcaatgtgtgcaggaggagctggtgtacacctgcaagcactaggcc

SEQ ID NO: 70 - protein, 218 aa, Artificial Sequence
  Description of Artifical Sequence:  Domain
MERCTCDDSPGLESRQAWQWGVCGDNLKYSTKFLSNFLGSKRGNKDLRARADAHNTHVGIKAVKSGLRTTCKCHGVSGSCAVRTCWKQLSPFRETGQVLKLRYDSAVKVSSATNEALGRLELWAPARQGSLTKGLAPRSGDLVYMEDSPSFCRPSKYSPGTAGRVCSREASCSSLCCGRGYDTQSRLVAFSCHCQVQWCCYVECQQCVQEELVYTCKH

SEQ ID NO: 71 - DNA, 849 bp, Artificial Sequence
  Description of Artifical Sequence:  Primer/Probe
aagcagtgtgacctgctgaagctgtcccggcggcagaagcagctctgccggagggagcccggcctggctgagaccctgagggatgctgcgcacctcggcctgcttgagtgccagtttcagttccggcatgagcgctggaactgtagcctggagggcaggatgggcctgctcaagagaggcttcaaagagacagctttcctgtacgcggtgtcctctgccgccctcacccacaccctggcccgggcctgcagcgctgggcgcatggagcgctgcacctgtgatgactctccggggctggagagccggcaggcctggcagtggggcgtgtgcggtgacaacctcaagtacagcaccaagtttctgagcaacttcctggggtccaagagaggaaacaaggacctgcgggcacgggcagacgcccacaatacccacgtgggcatcaaggctgtgaagagtggcctcaggaccacgtgtaagtgccatggcgtatcaggctcctgtgccgtgcgcacctgctggaagcagctctccccgttccgtgagacgggccaggtgctgaaactgcgctatgactcggctgtcaaggtgtccagtgccaccaatgaggccttgggccgcctagagctgtgggcccctgccaggcagggcagcctcaccaaaggcctggccccaaggtctggggacctggtgtacatggaggactcacccagcttctgccggcccagcaagtactcacctggcacagcaggtagggtgtgctcccgggaggccagctgcagcagcctgtgctgcgggcggggctatgacacccagagccgcctggtggccttctcctgccactgccaggtg

SEQ ID NO: 72 - protein, 283 aa, Artificial Sequence
  Description of Artifical Sequence:  Domain
KQCDLLKLSRRQKQLCRREPGLAETLRDAAHLGLLECQFQFRHERWNCSLEGRMGLLKRGFKETAFLYAVSSAALTHTLARACSAGRMERCTCDDSPGLESRQAWQWGVCGDNLKYSTKFLSNFLGSKRGNKDLRARADAHNTHVGIKAVKSGLRTTCKCHGVSGSCAVRTCWKQLSPFRETGQVLKLRYDSAVKVSSATNEALGRLELWAPARQGSLTKGLAPRSGDLVYMEDSPSFCRPSKYSPGTAGRVCSREASCSSLCCGRGYDTQSRLVAFSCHCQV

SEQ ID NO: 73 - DNA, 1093 bp, Artificial Sequence; identical to SEQ ID NO: 63
  Description of Artifical Sequence:  Primer/Probe

SEQ ID NO: 74 - protein, 360 aa, Artificial Sequence
  Description of Artifical Sequence:  Domain
MRPPPALALAGLCLLALPAAAASYFGLTGREVLTPFPGLGTAAAPAQGGAHLKQCDLLKLSRRQKQLCRREPGLAETLRDAAHLGLLECQFQFRHERWNCSLEGRTGLLKRGFKETAFLYAVSSAALTHTLARACSAGRMERCTCDDSPGLESRQAWQWGVCGDNLKYSTKFLSNFLGSKRGNKDLRARADAHNTHVGIKAVKSGLRTTCKCHGVSGSCAVRTCWKQLSPFRETGQVLKLRYDSAVKVSSATNEALGRLELWAPARQGSLTKGLAPRSGDLVYMEDSPSFCRPSKYSPGTAGRVCSREASCSSLCCGRGYDTQSRLVAFSCHCQVQWCCYVECQQCVQEELVYTCKHLEG

SEQ ID NO: 75 - DNA, 1024 bp, Artificial Sequence; identical to SEQ ID NO: 65
  Description of Artifical Sequence:  Primer/Probe

SEQ ID NO: 76 - protein, 341 aa, Artificial Sequence; identical to SEQ ID NO: 66
  Description of Artifical Sequence:  Domain

SEQ ID NO: 77 - DNA, 993 bp, Artificial Sequence
  Description of Artifical Sequence:  Primer/Probe
ctgaccgggcgggaagtcctgacgcccttcccaggattgggcactgcggcagccccggcacagggcggggcccacctgaagcagtgtgacctgctgaagctgtcccggcggcagaagcagctctgccggagggagcccggcctggctgagaccctgagggatgctgcgcacctcggcctgcttgagtgccagtttcagttccggcatgagcgctggaactgtagcctggagggcaggacgggcctgctcaagagaggcttcaaagagacagctttcctgtacgcggtgtcctctgccgccctcacccacaccctggcccgggcctgcagcgctgggcgcatggagcgctgcacctgtgatgactctccggggctggagagccgacaggcctggcaatggggcgtgtgcggtgacaacctcaagtacagcaccaagtttctgagcaacttcctggggtccaagagaggaaacaaggacctgcgggcacgggcagacgcccacaatacccacgtgggcatcaaggctgtgaagagtggcctcaggaccacgtgtaagtgccatggcgtatcaggctcctgtgccgtgcgcacctgctggaagcagctctccccgttccgtgagacgggccaggtgctgaaactgcgctatgacttggctgtcaaggtgtccagtgccaccaatgaggccttgggccgcctagagctgtgggcccctgccaggcagggcagcctcaccaaaggcctggccccaaggtctggggacctggtgtacatggaggactcacccagcttctgccggcccagcaagtactcacctggcacagcaggtagggtgtgctcccgggaggccagctgcagcagcctgtgctgcgggcggggctatgacacccagagccgcctggtggccttctcctgccactgccaggtgcagtggtgctgctacgtggagtgccagcaatgtgtgcaggaggagcttgtgtacacctgcaagcac

SEQ ID NO: 78 - protein, 331 aa, Artificial Sequence
  Description of Artifical Sequence:  Domain
LTGREVLTPFPGLGTAAAPAQGGAHLKQCDLLKLSRRQKQLCRREPGLAETLRDAAHLGLLECQFQFRHERWNCSLEGRTGLLKRGFKETAFLYAVSSAALTHTLARACSAGRMERCTCDDSPGLESRQAWQWGVCGDNLKYSTKFLSNFLGSKRGNKDLRARADAHNTHVGIKAVKSGLRTTCKCHGVSGSCAVRTCWKQLSPFRETGQVLKLRYDLAVKVSSATNEALGRLELWAPARQGSLTKGLAPRSGDLVYMEDSPSFCRPSKYSPGTAGRVCSREASCSSLCCGRGYDTQSRLVAFSCHCQVQWCCYVECQQCVQEELVYTCKH

SEQ ID NO: 79 - DNA, 993 bp, Artificial Sequence
  Description of Artifical Sequence:  Primer/Probe
ctgaccgggcgggaagtcctgacgcccttcccaggattgggcactgcggcagccccggcacagggcggggcccacctgaagcagtgtgacctgctgaagctgtcccggcggcagaagcagctctgccggagggagcccggcctggctgagaccctgagggatgctgcgcacctcggcctgcttgagtgccagtttcagttccggcatgagcgctggaactgtagcctggagggcaggacgggcctgctcaagagaggcttcaaagagacagctttcctgtacgcggtgtcctctgccgccctcacccacaccctggcccgggcctgcagcgctgggcgcatggagcgctgcacctgtgatgactctccggggctggagagccgacaggcctggcaatggggcgtgtgcggtgacaacctcaagtacagcaccaagtttctgagcaacttcctggggtccaagagaggaaacaaggacctgcgggcacgggcagacgcccacaatacccacgtgggcatcaaggctgtgaagagtggcctcaggaccacgtgtaagtgccatggcgtatcaggctcctgtgccgtgcgcacctgctggaagcagctctccccgttccgtgagacgggccaggtgctgaaactgcgctatgactcggctgtcaaggtgtccagtgccaccaatgaggccttgggccgcctagagctgtgggcccctgccaggcagggcagcctcaccaaaggcccggccccaaggtctggggacctggtgtacatggaggactcacccagcttctgccggcccagcaagtactcacctggcacagcaggtagggtgtgctcccgggaggccagctgcagcagcctgtgctgcgggcggggctatgacacccagagccgcctggtggccttctcctgccactgccaggtgcagtggtgctgctacgtggagtgccagcaatgtgtgcaggaggagcttgtgtacacctgcaagcac

SEQ ID NO: 80 - protein, 331 aa, Artificial Sequence
  Description of Artifical Sequence:  Domain
LTGREVLTPFPGLGTAAAPAQGGAHLKQCDLLKLSRRQKQLCRREPGLAETLRDAAHLGLLECQFQFRHERWNCSLEGRTGLLKRGFKETAFLYAVSSAALTHTLARACSAGRMERCTCDDSPGLESRQAWQWGVCGDNLKYSTKFLSNFLGSKRGNKDLRARADAHNTHVGIKAVKSGLRTTCKCHGVSGSCAVRTCWKQLSPFRETGQVLKLRYDSAVKVSSATNEALGRLELWAPARQGSLTKGPAPRSGDLVYMEDSPSFCRPSKYSPGTAGRVCSREASCSSLCCGRGYDTQSRLVAFSCHCQVQWCCYVECQQCVQEELVYTCKH

SEQ ID NO: 81 - DNA, 993 bp, Artificial Sequence
  Description of Artifical Sequence:  Primer/Probe
ctgaccgggcgggaagtcctgacgcccttcccaggattgggcactgcggcagccccggcacagggcggggcccacctgaagcagtgtgacctgctgaagctgtcccggcggcagaagcagctctgccggagggagcccggcctggctgagaccctgagggatgctgcgcacctcggcctgcttgagtgccagtttcagttccggcatgagcgctggaactgtagcctggagggcaggacgggcctgctcaagagaggcttcaaagagacagctttcctgtacgcggtgtcctctgccgccctcacccacaccctggcccgggcctgcagcgctgggcgcatggagcgctgcacctgtgatgactctccggggctggagagccgacaggcctggcaatggggcgtgtgcggtgacaacctcaagtacagcaccaagtttctgagcaacttcctggggtccaagagaggaaacaaggacctgcgggcacgggcagacgcccacaatacccacgtgggcatcaaggctgtgaagagtggcctcaggaccacgtgtaagtgccatggcgtatcaggctcctgtgccgtgcgcacctgctggaagcagctctccccgttccgtgagacgggccaggtgctgaaactgcgctatgactcggctgtcaaggtgtccagtgccaccaatgaggccttgggccgcctagagctgtgggcccctgccaggcagggcagcctcaccaaaggcctggccccaaggtctggggacccggtgtacatggaggactcacccagcttctgccggcccagcaagtactcacctggcacagcaggtagggtgtgctcccgggaggccagctgcagcagcctgtgctgcgggcggggctatgacacccagagccgcctggtggccttctcctgccactgccaggtgcagtggtgctgctacgtggagtgccagcaatgtgtgcaggaggagcttgtgtacacctgcaagcac

SEQ ID NO: 82 - protein, 331 aa, Artificial Sequence
  Description of Artifical Sequence:  Domain
LTGREVLTPFPGLGTAAAPAQGGAHLKQCDLLKLSRRQKQLCRREPGLAETLRDAAHLGLLECQFQFRHERWNCSLEGRTGLLKRGFKETAFLYAVSSAALTHTLARACSAGRMERCTCDDSPGLESRQAWQWGVCGDNLKYSTKFLSNFLGSKRGNKDLRARADAHNTHVGIKAVKSGLRTTCKCHGVSGSCAVRTCWKQLSPFRETGQVLKLRYDSAVKVSSATNEALGRLELWAPARQGSLTKGLAPRSGDPVYMEDSPSFCRPSKYSPGTAGRVCSREASCSSLCCGRGYDTQSRLVAFSCHCQVQWCCYVECQQCVQEELVYTCKH

SEQ ID NO: 83 - DNA, 993 bp, Artificial Sequence
  Description of Artifical Sequence:  Primer/Probe
ctgaccgggcgggaagtcctgacgcccttcccaggattgggcactgcggcagccccggcacagggcggggcccacctgaagcagtgtgacctgctgaagctgtcccggcggcagaagcagctctgccggagggagcccggcctggctgagaccctgagggatgctgcgcacctcggcctgcttgagtgccagtttcagttccggcatgagcgctggaactgtagcctggagggcaggacgggcctgctcaagagaggcttcaaagagacagctttcctgtacgcggtgtcctctgccgccctcacccacaccctggcccgggcctgcagcgctgggcgcatggagcgctgcacctgtgatgactctccggggctggagagccgacaggcctggcaatggggcgtgtgcggtgacaacctcaagtacagcaccaagtttctgagcaacttcctggggtccaagagaggaaacaaggacctgcgggcacgggcagacgcccacaatacccacgtgggcatcaaggctgtgaagagtggcctcaggaccacgtgtaagtgccatggcgtatcaggctcctgtgccgtgcgcacctgctggaagcagctctccccgttccgtgagacgggccaggtgctgaaactgcgctatgactcggctgtcaaggtgtccagtgccaccaatgaggccttgggccgcctagagctgtgggcccctgccaggcagggcagcctcaccaaaggcctggccccaaggtctggggacctggtgtacatggaggactcacccagcttctgccggtccagcaagtactcacctggcacagcaggtagggtgtgctcccgggaggccagctgcagcagcctgtgctgcgggcggggctatgacacccagagccgcctggtggccttctcctgccactgccaggtgcagtggtgctgctacgtggagtgccagcaatgtgtgcaggaggagcttgtgtacacctgcaagcac

SEQ ID NO: 84 - protein, 331 aa, Artificial Sequence
  Description of Artifical Sequence:  Domain
LTGREVLTPFPGLGTAAAPAQGGAHLKQCDLLKLSRRQKQLCRREPGLAETLRDAAHLGLLECQFQFRHERWNCSLEGRTGLLKRGFKETAFLYAVSSAALTHTLARACSAGRMERCTCDDSPGLESRQAWQWGVCGDNLKYSTKFLSNFLGSKRGNKDLRARADAHNTHVGIKAVKSGLRTTCKCHGVSGSCAVRTCWKQLSPFRETGQVLKLRYDSAVKVSSATNEALGRLELWAPARQGSLTKGLAPRSGDLVYMEDSPSFCRSSKYSPGTAGRVCSREASCSSLCCGRGYDTQSRLVAFSCHCQVQWCCYVECQQCVQEELVYTCKH

SEQ ID NO: 85 - DNA, 993 bp, Artificial Sequence
  Description of Artifical Sequence:  Primer/Probe
ctgaccgggcgggaagtcctgacgcccttcccaggattgggcactgcggcagccccggcacagggcggggcccacctgaagcagtgtgacctgctgaagctgtcccggcggcagaagcagctctgccggagggagcccggcctggctgagaccctgagggatgctgcgcacctcggcctgcttgagtgccagtttcagttccggcatgagcgctggaactgtagcctggagggcaggacgggcctgctcaagagaggcttcaaagagacagctttcctgtacgcggtgtcctctgccgccctcacccacaccctggcccgggcctgcagcgctgggcgcatggagcgctgcacctgtgatgactctccggggctggagagccgacaggcctggcaatggggcgtgtgcggtgacaacctcaagtacagcaccaagtttctgagcaacttcctggggtccaagagaggaaacaaggacctgcgggcacgggcagacgcccacaatacccacgtgggcatcaaggctgtgaagagtggcctcaggaccacgtgtaagtgccatggcgtatcaggctcctgtgccgtgcgcacctgctggaagcagctctccccgttccgtgagacgggccaggtgctgaaactgcgctatgactcggctgtcaaggtgtccagtgccaccaatgaggccttgggccgcctagagctgtgggcccctgccaggcagggcagcctcaccaaaggcctggccccaaggtctggggacctggtgtacatggaggactcacccagcttctgccggcccagcaagtactcacctggcacagcaggtagggtgtgctcccgggaggccagctgcagcagcctgtgctgcgggcggggctgtgacacccagagccgcctggtggccttctcctgccactgccaggtgcagtggtgctgctacgtggagtgccagcaatgtgtgcaggaggagcttgtgtacacctgcaagcac

SEQ ID NO: 86 - protein, 331 aa, Artificial Sequence
  Description of Artifical Sequence:  Domain
LTGREVLTPFPGLGTAAAPAQGGAHLKQCDLLKLSRRQKQLCRREPGLAETLRDAAHLGLLECQFQFRHERWNCSLEGRTGLLKRGFKETAFLYAVSSAALTHTLARACSAGRMERCTCDDSPGLESRQAWQWGVCGDNLKYSTKFLSNFLGSKRGNKDLRARADAHNTHVGIKAVKSGLRTTCKCHGVSGSCAVRTCWKQLSPFRETGQVLKLRYDSAVKVSSATNEALGRLELWAPARQGSLTKGLAPRSGDLVYMEDSPSFCRPSKYSPGTAGRVCSREASCSSLCCGRGCDTQSRLVAFSCHCQVQWCCYVECQQCVQEELVYTCKH

SEQ ID NO: 87 - DNA, 993 bp, Artificial Sequence
  Description of Artifical Sequence:  Primer/Probe
ctgaccgggcgggaagtcctgacgcccttcccaggattgggcactgcggcagccccggcacagggcggggcccacctgaagcagtgtgacctgctgaagctgtcccggcggcagaagcagctctgccggagggagcccggcctggctgagaccctgagggatgctgcgcacctcggcctgcttgagtgccagtttcagttccggcatgagcgctggaactgtagcctggagggcaggacgggcctgctcaagagaggcttcaaagagacagctttcctgtacgcggtgtcctctgccgccctcacccacaccctggcccgggcctgcagcgctgggcgcatggagcgctgcacctgtgatgactctccggggctggagagccgacaggcctggcaatggggcgtgtgcggtgacaacctcaagtacagcaccaagtttctgagcaacttcctggggtccaagagaggaaacaaggacctgcgggcacgggcagacgcccacaatacccacgtgggcatcaaggctgtgaagagtggcctcaggaccacgtgtaagtgccatggcgtatcaggctcctgtgccgtgcgcacctgctggaagcagctctccccgttccgtgagacgggccaggtgctgaaactgcgctatgactcggctgtcaaggtgtccagtgccaccaatgaggccttgggccgcctagagctgtgggcccctgccaggcagggcagcctcaccaaaggcctggccccaaggtctggggacctggtgtacatggaggactcacccagcttctgccggcccagcaagtactcacctggcacagcaggtagggtgtgctcccgggaggccagctgcagcagcctgtgctgcgggcggggctatgacacccagagccgcctggtggccttctcctgccactgccaggtgcagtggtgctgctacgtggagtgccagcaatgtgtgcaggaggagcttgcgtacacctgcaagcac

SEQ ID NO: 88 - protein, 331 aa, Artificial Sequence
  Description of Artifical Sequence:  Domain
LTGREVLTPFPGLGTAAAPAQGGAHLKQCDLLKLSRRQKQLCRREPGLAETLRDAAHLGLLECQFQFRHERWNCSLEGRTGLLKRGFKETAFLYAVSSAALTHTLARACSAGRMERCTCDDSPGLESRQAWQWGVCGDNLKYSTKFLSNFLGSKRGNKDLRARADAHNTHVGIKAVKSGLRTTCKCHGVSGSCAVRTCWKQLSPFRETGQVLKLRYDSAVKVSSATNEALGRLELWAPARQGSLTKGLAPRSGDLVYMEDSPSFCRPSKYSPGTAGRVCSREASCSSLCCGRGYDTQSRLVAFSCHCQVQWCCYVECQQCVQEELAYTCKH

SEQ ID NO: 89 - DNA, 1128 bp, Artificial Sequence
  Description of Artifical Sequence:  Primer/Probe
tcccggccctccgcgccctctcgcgcggcgatggccccactcggatacttcttactcctctgcagcctgaagcaggctctgggcagctacccgatctggtggctgacgggcagcgagcccctgaccatcctcccgctgaccctggagccagaggcggctgcccaggcgcactacaaggcctgcgaccggctgaagctggagcggaagcagcggcgcatgtgccgccgggacccgggcgtggcagagacgctggtggaggccgtgagcatgagtgcgctcgagtgccagttccagttccgctttgagcgctggaactgcacgctggagggccgctaccgggccagcctgctcaagcgaggtttcaaggagactgccttcctctatgccatctcctcggctggcctgacgcacgcactggccaaggcgtgcagcgcgggccgcatggagcgctgtacctgcgatgaggcacccgacctggagaaccgtgaggcctggcagtgggggggctgcggagacaaccttaagtacagcagcaagttcgtcaaggaattcctgggcagacggtcaagcaaggatctgcgagcccgtgtggacttccacaacaacctcgtgggtgtgaaggtgatcaaggctggggtggagaccacctgcaagtgccacggcgtgtcaggctcatgcacggtgcggacctgctggcggcagttggcgcctttccatgaggtgggcaagcatctgaagcacaagtatgagacggcactcaaggtgggcagcaccaccaatgaagctgccggcgaggcaggtgccatctccccaccacggggccgtgcctcgggggcaggtggcagcgacccgctgccccgcactccagagctggtgcacctggatgactcgcctagcttctgcctggctggccgcttctccccgggcaccgctggccgtaggtgccaccgtgagaagaactgcgagagcatctgctgtggccgcggccataacacacagagccgggtggtgacaaggccctgccagtgccaggtgcgttggtgctgctatgtggagtgcaggcagtgcacgcagcgtgaggaggtctacacctgcaagggctgagttcccaggccctgccagccctgc

SEQ ID NO: 90 - protein, 357 aa, Artificial Sequence
  Description of Artifical Sequence:  Domain
MAPLGYFLLLCSLKQALGSYPIWWLTGSEPLTILPLTLEPEAAAQAHYKACDRLKLERKQRRMCRRDPGVAETLVEAVSMSALECQFQFRFERWNCTLEGRYRASLLKRGFKETAFLYAISSAGLTHALAKACSAGRMERCTCDEAPDLENREAWQWGGCGDNLKYSSKFVKEFLGRRSSKDLRARVDFHNNLVGVKVIKAGVETTCKCHGVSGSCTVRTCWRQLAPFHEVGKHLKHKYETALKVGSTTNEAAGEAGAISPPRGRASGAGGSDPLPRTPELVHLDDSPSFCLAGRFSPGTAGRRCHREKNCESICCGRGHNTQSRVVTRPCQCQVRWCCYVECRQCTQREEVYTCKG

SEQ ID NO: 91 - DNA, 1029 bp, Artificial Sequence
  Description of Artifical Sequence:  Primer/Probe
ggatccagctacccgatctggtggctgacgggcagcgagcccctgaccatcctcccgctgaccctggagccagaggcgggcgcccaggcgcactacaaggcctgcgaccggctgaagctggagcggaagcagcggcgcatgtgccgccgggacccgggcgtggtagagacgctggtggaggccgtgagcatgagtgcgctcgagtgccagttccagttccgctttgagcgctggaactgcacgctggagggccgctaccgggccagcctgctcaagcgaggcttcaaggagactgccttcctctatgccatctcctcggctggcctgacgcacgcactggccaaggcgtgcagcgcgggccgcatggagcgctgtacctgcgatgaggcacccgacctggagaaccgtgaggcctggcagtgggggggctgcggagacaaccttaagtacagcagcaagttcgtcaaggaattcctgggcagacggtcaagcaaggatctgcgagcccgtgtggacttccacaacaacctcgtgggtgtgaaggtgatcaaggctggggtggagaccacctgcaagtgccacggcgtgtcaggctcatgcacggtgcggacctgctggcggcagttggcgcctttccatgaggtgggcaagcatctgaagcacaagtatgagacggcactcaaggtgggcagcaccaccaatgaagctgccggcgaggcaggtgccatctccccaccacggggccgtgcctcgggggcaggtggcagcgacccgctgccccgcactccagagctggtgcacctggatgactcgcctagcttctgcctggctggccgcttctccccgggcaccgctggccgtaggtgccaccgtgagaagaactgcgagagcatctgctgtggccgcggccataacacacagagccgggtggtgacaaggccctgccagtgccaggtgcgttggtgctgctatgtggagtgcaggcagtgcacgcagcgtgaggaggtctacacctgcaagggcgtcgac

SEQ ID NO: 92 - protein, 343 aa, Artificial Sequence
  Description of Artifical Sequence:  Domain
GSSYPIWWLTGSEPLTILPLTLEPEAGAQAHYKACDRLKLERKQRRMCRRDPGVVETLVEAVSMSALECQFQFRFERWNCTLEGRYRASLLKRGFKETAFLYAISSAGLTHALAKACSAGRMERCTCDEAPDLENREAWQWGGCGDNLKYSSKFVKEFLGRRSSKDLRARVDFHNNLVGVKVIKAGVETTCKCHGVSGSCTVRTCWRQLAPFHEVGKHLKHKYETALKVGSTTNEAAGEAGAISPPRGRASGAGGSDPLPRTPELVHLDDSPSFCLAGRFSPGTAGRRCHREKNCESICCGRGHNTQSRVVTRPCQCQVRWCCYVECRQCTQREEVYTCKGVD

SEQ ID NO: 93 - DNA, 1029 bp, Artificial Sequence
  Description of Artifical Sequence:  Primer/Probe
ggatccagctacccgatctggtggctgacgggcagcgagcccctgaccatcctcccgctgaccctggagccagaggcggccgcccaggcgcactacaaggcctgcgaccggctgaagctggagcggaagcagcggcgcatgtgccgccgggacccgggcgtggcagagacgctggtggaggccgtgagcatgagtgcgctcgagtgccagttccagttccgctttgagcgctggaactgcacgctggagggccgctaccgggccagcctgctcaagcgaggcttcaaggagactgccttcctctatgccatctcctcggctggcctgacgcacgcactggccaaggcgtgcagcgcgggccgcatggagcgctgtacctgcgatgaggcacccgacctggagaaccgtgaggcctggcagtgggggggctgcggagacaaccttaagtacagcagcaagttcgtcaaggaattcctgggcagacggtcaagcaaggatctgcgagcccgtgtggacttccacaacaacctcgtgggtgtgaaggtgatcaaggctggggtggagaccacctgcaagtgccacggcgtgtcaggctcatgcacggtgcggacctgctggcggcagttggcgcctttccatgaggtgggcaagcatctgaagcacaagtatgagacggcactcaaggtgggcagcaccaccaatgaagctgccggcgaggcaggtgccatctccccaccacggggccgtgcctcgggggcaggtggcagcgacccgctgccccgcactccagagctggtgcacctggatgactcgcctagcttctgcctggctggccgcttctccccgggcaccgctggccgtaggtgccaccgtgagaagaactgcgagagcatctgctgtggccgcggccataacacacagagccgggtggtgacaaggccctgccagtgccaggtgcgttggtgctgctatgtggagtgcaggcagtgcacgcagcgtgaggaggtctacacctgcaagggcgtcgac

SEQ ID NO: 94 - protein, 343 aa, Artificial Sequence
  Description of Artifical Sequence:  Domain
GSSYPIWWLTGSEPLTILPLTLEPEAAAQAHYKACDRLKLERKQRRMCRRDPGVAETLVEAVSMSALECQFQFRFERWNCTLEGRYRASLLKRGFKETAFLYAISSAGLTHALAKACSAGRMERCTCDEAPDLENREAWQWGGCGDNLKYSSKFVKEFLGRRSSKDLRARVDFHNNLVGVKVIKAGVETTCKCHGVSGSCTVRTCWRQLAPFHEVGKHLKHKYETALKVGSTTNEAAGEAGAISPPRGRASGAGGSDPLPRTPELVHLDDSPSFCLAGRFSPGTAGRRCHREKNCESICCGRGHNTQSRVVTRPCQCQVRWCCYVECRQCTQREEVYTCKGVD

SEQ ID NO: 95 - DNA, 1085 bp, Artificial Sequence
  Description of Artifical Sequence:  Primer/Probe
tagtgagccgagatggcactactatattccagcttgggtgtggttgtgtgcacctgtagtcctagttactttggactgacgggcagcgagcccctgaccatcctcccgctgaccctggagccagaggcggctgcccaggcgcactacaaggcctgcgaccggctgaagctggagcggaagcagcggcgcatgtgccgccgggacccgggcgtggcagagacgctggtggaggccgtgagcatgagtgcgctcgagtgccagttccagttccgctttgagcgctggaactgcacgctggagggccgctaccgggccagcctgctcaagcgaggtttcaaggagactgccttcctctatgccatctcctcggctggcctgacgcacgcactggccaaggcgtgcagcgcgggccgcatggagcgctgtacctgcgatgaggcacccgacctggagaaccgtgagggctggaagtggggtggctgtagcgaggacatcgagtttggtgggatggtgtctcgggagttcgccgacgcccgggagaaccggccagatgcccgctcagccatgaaccgccacaacaacgaggctgggcgccaggtgatcaaggctggggtggagaccacctgcaagtgccacggcgtgtcaggctcatgcacggtgcggacctgctggcggcagttggcgcctttccatgaggtgggcaagcatctgaagcacaagtatgagtcggcactcaaggtgggcagcaccaccaatgaagctgccggcgaggcaggtgccatctccccaccacggggccgtgcctcgggggcaggtggcagcgacccgctgccccgcactccagagctggtgcacctggatgactcgcctagcttctgcctggctggccgcttctccccgggcaccgctggccgtaggtgccaccgtgagaagaactgcgagagcatctgctgtggccgcggccataacacacagagccgggtggtgacaaggccctgccagtgccaggtgcgttggtgctgctatgtggagtgcaggcagtgcacgcagcgtgaggaggtctacacctgcaagggctgagttcc

SEQ ID NO: 96 - protein, 355 aa, Artificial Sequence
  Description of Artifical Sequence:  Domain
MALLYSSLGVVVCTCSPSYFGLTGSEPLTILPLTLEPEAAAQAHYKACDRLKLERKQRRMCRRDPGVAETLVEAVSMSALECQFQFRFERWNCTLEGRYRASLLKRGFKETAFLYAISSAGLTHALAKACSAGRMERCTCDEAPDLENREGWKWGGCSEDIEFGGMVSREFADARENRPDARSAMNRHNNEAGRQVIKAGVETTCKCHGVSGSCTVRTCWRQLAPFHEVGKHLKHKYESALKVGSTTNEAAGEAGAISPPRGRASGAGGSDPLPRTPELVHLDDSPSFCLAGRFSPGTAGRRCHREKNCESICCGRGHNTQSRVVTRPCQCQVRWCCYVECRQCTQREEVYTCKG

SEQ ID NO: 97 - DNA, 1029 bp, Artificial Sequence; identical to SEQ ID NO: 93
  Description of Artifical Sequence:  Primer/Probe

SEQ ID NO: 98 - protein, 339 aa, Artificial Sequence
  Description of Artifical Sequence:  Domain
SYPIWWLTGSEPLTILPLTLEPEAAAQAHYKACDRLKLERKQRRMCRRDPGVAETLVEAVSMSALECQFQFRFERWNCTLEGRYRASLLKRGFKETAFLYAISSAGLTHALAKACSAGRMERCTCDEAPDLENREAWQWGGCGDNLKYSSKFVKEFLGRRSSKDLRARVDFHNNLVGVKVIKAGVETTCKCHGVSGSCTVRTCWRQLAPFHEVGKHLKHKYETALKVGSTTNEAAGEAGAISPPRGRASGAGGSDPLPRTPELVHLDDSPSFCLAGRFSPGTAGRRCHREKNCESICCGRGHNTQSRVVTRPCQCQVRWCCYVECRQCTQREEVYTCKG

SEQ ID NO: 99 - DNA, 1631 bp, Artificial Sequence
  Description of Artifical Sequence:  Primer/Probe
ggcgcggcaagatgctggatgggtccccgctggcgcgctggctggccgcggccttcgggctgacgctgctgctcgccgcgctgcgcccttcggccgcctacttcgggctgacgggcagcgagcccctgaccatcctcccgctgaccctggagccagaggcggccgcccaggcgcactacaaggcctgcgaccggctgaagctggagcggaagcagcggcgcatgtgccgccgggacccgggcgtggcagagacgctggtggaggccgtgagcatgagtgcgctcgagtgccagttccagttccgctttgagcgctggaactgcacgctggagggccgctaccgggccagcctgctcaagcgaggcttcaaggagactgccttcctctatgccatctcctcggctggcctgacgcacgcactggccaaggcgtgcagcgcgggccgcatggagcgctgtacctgcgatgaggcacccgacctggagaaccgtgaggcctggcagtgggggggctgcggagacaaccttaagtacagcagcaagttcgtcaaggaattcctgggcagacggtcaagcaaggatctgcgagcccgtgtggacttccacaacaacctcgtgggtgtgaaggtgatcaaggctggggtggagaccacctgcaagtgccacggcgtgtcaggctcatgcacggtgcggacctgctggcggcagttggcgcctttccatgaggtgggcaagcatctgaagcacaagtatgagacggcactcaaggtgggcagcaccaccaatgaagctgccggcgaggcaggtgccatctccccaccacggggccgtgcctcgggggcaggtggcagcgacccgctgccccgcactccagagctggtgcacctggatgactcgcctagcttctgcctggctggccgcttctccccgggcaccgctggccgtaggtgccaccgtgagaagaactgcgagagcatctgctgtggccgcggccataacacacagagccgggtggtgacaaggccctgccagtgccaggtgcgttggtgctgctatgtggagtgcaggcagtgcacgcagcgtgaggaggtctacacctgcaagggctgagttcccaggccctgccagccctgctgcacagggtgcaggcattgcacacggtgtgaagggtctacacctgcacaggctgagttcctgggctcgaccagcccagctgcgtggggtacaggcattgcacacagtgtgaatgggtctacacctgcatgggctgagtccctgggctcagacctagcagcgtggggtagtccctgggctcagtcctagctgcatggggtgcaggcattgcacagagcatgaatgggcctacacctgccaaggctgaatccctgggcccagccagccctgctgcacatggcacaggcattgcacacggtgtgaggagtgtacacctgcaagggctgaggccctgggcccagtcagccctgctgctcagagtgcaggcattgcacatggtgtgagaaggtctacacctgcaagggacgagtccccgggcctggccaaccctgctgtgcagggtgagggccatgcatgctagtatgaggggtctacacctgcaaggactgagaggctttt

SEQ ID NO: 100 - protein, 365 aa, Artificial Sequence
  Description of Artifical Sequence:  Domain
MLDGSPLARWLAAAFGLTLLLAALRPSAAYFGLTGSEPLTILPLTLEPEAAAQAHYKACDRLKLERKQRRMCRRDPGVAETLVEAVSMSALECQFQFRFERWNCTLEGRYRASLLKRGFKETAFLYAISSAGLTHALAKACSAGRMERCTCDEAPDLENREAWQWGGCGDNLKYSSKFVKEFLGRRSSKDLRARVDFHNNLVGVKVIKAGVETTCKCHGVSGSCTVRTCWRQLAPFHEVGKHLKHKYETALKVGSTTNEAAGEAGAISPPRGRASGAGGSDPLPRTPELVHLDDSPSFCLAGRFSPGTAGRRCHREKNCESICCGRGHNTQSRVVTRPCQCQVRWCCYVECRQCTQREEVYTCKG

SEQ ID NO: 101 - DNA, 514 bp, Artificial Sequence
  Description of Artifical Sequence:  Primer/Probe
cgcgcgcccgaacgaagccgcggcccgggcacagccatggcccggcgggcggggggcgctcggatgttcggcagcctcctgctcttcgccctgctcgctgccggcgtcgccccgctcagctgggatctcccggagccccgcagccgagccagcaagatccgagtgcactcgcgaggcaacctctgggccaccggtcacttcatgggcaagaagagtctggagccttccagcccatccccattggggacagctccccacacctccctgagggaccagcgactgcagctgagtcatgatctgctcggaatcctcctgctaaagaaggctctgggcgtgagcctcagccgccccgcaccccaaatccagtacaggaggctgctggtacaaatactgcagaaatgacaccaataatggggcagacacaacagcgtggcttagattgtgcccacccagggaaggtgctgaatgggaccctgttgatggccatcaacagggtcccattcagcacaggctg

SEQ ID NO: 102 - protein, 121 aa, Artificial Sequence
  Description of Artifical Sequence:  Domain
MARRAGGARMFGSLLLFALLAAGVAPLSWDLPEPRSRASKIRVHSRGNLWATGHFMGKKSLEPSSPSPLGTAPHTSLRDQRLQLSHDLLGILLLKKALGVSLSRPAPQIQYRRLLVQILQK

SEQ ID NO: 103 - DNA, 646 bp, Artificial Sequence
  Description of Artifical Sequence:  Primer/Probe
agcgcgcccgaacgaagccgcggcccgggcacagcatggcccgcggcgggagggcgctcggatgttcggcagcctcctgcacttcgccctgctcgctgccggcgtcgtcccgctcagctgggatctcccggagccccgcagccgagccagcaagatccgagtgcactcgcgaggcaagctctgggccatcggtcacttcatgggcaagaagagtctggagccttccagcccatccccattggggacagctccccacacctccctgagggaccagcgactgcagctgagtcatgatctgctcggaatcctcctgctaaagaaggctctgggcgtgagcctcagccgccccgcaccccaaatccagtacaggaggctgctggtacaaatactgcagaaatgacaccaataatggggcagacacaacagcgtggcttagattgtgcccacccagggaaggtgctgaatgggaccctgttgatggccccatctggatgtaaatcctgagctcaaatctctgttactccattactgtgatttctggctgggtcaccagaaatatcgctgatgcagacacagattatgttcctgctgtatttcctgcttccctgttgaattggtgaataaaaccttgctctatacatacaaa

SEQ ID NO: 104 - protein, 112 aa, Artificial Sequence
  Description of Artifical Sequence:  Domain
MFGSLLHFALLAAGVVPLSWDLPEPRSRASKIRVHSRGKLWAIGHFMGKKSLEPSSPSPLGTAPHTSLRDQRLQLSHDLLGILLLKKALGVSLSRPAPQIQYRRLLVQILQK

SEQ ID NO: 105 - DNA, 30 bp, Artificial Sequence
  Description of Artifical Sequence:  Primer/Probe
ggcaagctctgggccatcggtcacttcatg

SEQ ID NO: 106 - protein, 10 aa, Artificial Sequence
  Description of Artifical Sequence:  Domain
GKLWAIGHFM

SEQ ID NO: 107 - DNA, 514 bp, Artificial Sequence
  Description of Artifical Sequence:  Primer/Probe
cgcgcgcccgaacgaagccgcggcccgggcacagccatggcccggcgggcggggggcgctcggatgttcggcagcctcctgctcttcgccctgctcgctgccggcgtcgccccgctcagctgggatctcccggagccccgcagccgagccagcaagatccgagtgcactcgcgaggcaacctctgggccgccggtcacttcatgggcaagaagagtctggagccttccagcccatccccattggggacagctccccacacctccctgagggaccagcgactgcagctgagtcatgatctgctcggaatcctcctgctaaagaaggctctgggcgtgagcctcagccgccccgcaccccaaatccagtacaggaggctgctggtacaaatactgcagaaatgacaccaataatggggcagacacaacagcgtggcttagattgtgcccacccagggaaggtgctgaatgggaccctgttgatggccatcaacagggtcccattcagcacaggctg

SEQ ID NO: 108 - protein, 121 aa, Artificial Sequence
  Description of Artifical Sequence:  Domain
MARRAGGARMFGSLLLFALLAAGVAPLSWDLPEPRSRASKIRVHSRGNLWAAGHFMGKKSLEPSSPSPLGTAPHTSLRDQRLQLSHDLLGILLLKKALGVSLSRPAPQIQYRRLLVQILQK

SEQ ID NO: 109 - DNA, 514 bp, Artificial Sequence
  Description of Artifical Sequence:  Primer/Probe
cgcgcgcccgaacgaagccgcggcccgggcacagccatggcccggcgggcggggggcgctcggatgttcggcagcctcctgctcttcgccctgctcgctgccggcgtcgccccgctcagctgggatctcccggagccccgcagccgagccagcaagatccgagtgcactcgcgaggcaacctctgggccaccggtcacttcatgggcaagaagagtctggagccttccagcccatccccattggggacagctacccacacctccctgagggaccagcgactgcagctgagtcatgatctgctcggaatcctcctgctaaagaaggctctgggcgtgagcctcagccgccccgcaccccaaatccagtacaggaggctgctggtacaaatactgcagaaatgacaccaataatggggcagacacaacagcgtggcttagattgtgcccacccagggaaggtgctgaatgggaccctgttgatggccatcaacagggtcccattcagcacaggctg

SEQ ID NO: 110 - protein, 121 aa, Artificial Sequence [sequence omitted]

SEQ ID NO: 111 - DNA, 514 bp, Artificial Sequence
  Description of Artifical Sequence:  Primer/Probe
cgcgcgcccgaacgaagccgcggcccgggcacagccatggcccggcgggcggggggcgctcggatgttcggcagcctcctgctcttcgccctgctcgctgccggcgtcgccccgctcagctgggatctcccggagccccgcagccgagccagcaagatccgagtgcactcgcgaggcaacctctgggccaccggtcacttcatgggcaagaagagtctggagccttccagcccatccccattggggacagctccccacacctccctgagggaccagcgactgcagctgagtcatgatctgctcggaatcctcctgctaaagaaggctctgggcgtgagcctcagccgccccgcaccccaaatccagtacaggaggctgctggtacaaatactgcagaaataacaccaataatggggcagacacaacagcgtggcttagattgtgcccacccagggaaggtgctgaatgggaccctgttgatggccatcaacagggtcccattcagcacaggctg

SEQ ID NO: 112 - protein, 121 aa, Artificial Sequence; identical to SEQ ID NO: 102
  Description of Artifical Sequence:  Domain

SEQ ID NO: 113 - DNA, 614 bp, Artificial Sequence
  Description of Artifical Sequence:  Primer/Probe
accatgggctccgggcgccgggcgctgtccgcggtgccggccgtgctgctggtcctcacgctgccggggctgcccgtctgggcacagaacgacacggagcccatcgtgctggagggcaagtgtctggtggtgtgcgactcgaacccggccacggactccaagggctcctcttcctccccgctggggatatcggtccgggcggccaactccaaggtcgccttctcggcggtgcggagcaccaaccacgagccatccgagatgagcaacaagacgcgcatcatttacttcgatcagatcctggtgaatgtgggtaattttttcacattggagtctgtctttgtagcaccaagaaaaggaatttacagtttcagttttcacgtgattaaagtctaccagagccaaactatccaggttaacttgatgttaaatggaaaaccagtaatatctgcctttgcgggggacaaagatgttactcgtgaagctgccacgaatggtgtcctgctctacctagataaagaggataaggtttacctaaaactggagaaaggtaatttggttggaggctggcagtattccacgttttctggctttctggtgttccccctataggattc

SEQ ID NO: 114 - protein, 201 aa, Artificial Sequence
  Description of Artifical Sequence:  Domain
MGSGRRALSAVPAVLLVLTLPGLPVWAQNDTEPIVLEGKCLVVCDSNPATDSKGSSSSPLGISVRAANSKVAFSAVRSTNHEPSEMSNKTRIIYFDQILVNVGNFFTLESVFVAPRKGIYSFSFHVIKVYQSQTIQVNLMLNGKPVISAFAGDKDVTREAATNGVLLYLDKEDKVYLKLEKGNLVGGWQYSTFSGFLVFPL

SEQ ID NO: 115 - DNA, 614 bp, Artificial Sequence; identical to SEQ ID NO: 113
  Description of Artifical Sequence:  Primer/Probe

SEQ ID NO: 116 - protein, 201 aa, Artificial Sequence; identical to SEQ ID NO: 114
  Description of Artifical Sequence:  Domain

SEQ ID NO: 117 - DNA, 522 bp, Artificial Sequence
  Description of Artifical Sequence:  Primer/Probe
cagaacgacacggagcccattgtgctggagggcaagtgtctggtggtgtgcgactcgaacccggccacggactccaagggctcctcttcctccccgctggggatatcggtccgggcggccaactccaaggtcgccttctcggcggtgcggagcaccaaccacgagccatccgagatgagcaacaagacgcgcatcatttacttcgatcagatcctggtgaatgtgggtaattttttcacattggagtctgtctttgtagcaccaagaaaaggaatttacagtttcagttttcacgtgattaaagtctaccagagccaaactatccaggttaacttgatgttaaatggaaaaccagtaatatctgcctttgcgggggacaaagatgttactcgtgaagctgccacgaatggtgtcctgctctacctagataaagaggataaggtttacctaaaactggagaaaggtaatttggttggaggctggcagtattccacgttttctggctttctggtgttcccccta

SEQ ID NO: 118 - protein, 174 aa, Artificial Sequence
  Description of Artifical Sequence:  Domain
QNDTEPIVLEGKCLVVCDSNPATDSKGSSSSPLGISVRAANSKVAFSAVRSTNHEPSEMSNKTRIIYFDQILVNVGNFFTLESVFVAPRKGIYSFSFHVIKVYQSQTIQVNLMLNGKPVISAFAGDKDVTREAATNGVLLYLDKEDKVYLKLEKGNLVGGWQYSTFSGFLVFPL

SEQ ID NO: 119 - DNA, 48 bp, Artificial Sequence
  Description of Artifical Sequence:  Primer/Probe
gcggccaactccaaggtcgccttctcggcggtgcggagcaccaaccac

SEQ ID NO: 120 - protein, 16 aa, Artificial Sequence
  Description of Artifical Sequence:  Domain
AANSKVAFSAVRSTNH

SEQ ID NO: 121 - DNA, 45 bp, Artificial Sequence
  Description of Artifical Sequence:  Primer/Probe
gccaactccaaggtcgccttctcggcggtgcggagcaccaaccac

SEQ ID NO: 122 - protein, 15 aa, Artificial Sequence
  Description of Artifical Sequence:  Domain
ANSKVAFSAVRSTNH

SEQ ID NO: 123 - DNA, 274 bp, Artificial Sequence
  Description of Artifical Sequence:  Primer/Probe
accaccatggcactgcaggctgaattcgacaaggctgcagaagacgtgaggaagctgccaacaagaccagcagataataaagaactgaaaaaactcgatggactttacaaacaagctataattggagacattaatattgagtatctgggaatgctggatttaaagggcaaggccaaatgcgcagcatggaccctccaaaaaaggttgtcaaaggaagatgcaacgagtgtctctatttctaaggcaaaagagccgatagaaaaataggacattt

SEQ ID NO: 124 - protein, 86 aa, Artificial Sequence
  Description of Artifical Sequence:  Domain
MALQAEFDKAAEDVRKLPTRPADNKELKKLDGLYKQAIIGDINIEYLGMLDLKGKAKCAAWTLQKRLSKEDATSVSISKAKEPIEK

SEQ ID NO: 125 - DNA, 280 bp, Artificial Sequence
  Description of Artifical Sequence:  Primer/Probe
accaccatggcactgcaggctgaattcgacaaggctgcagaagacgtgaggaagctgccaacaagaccagcagataataaagaactgaaaaaactcgatggactttacaaacaagctataattggagacattaatattgagtatctgggaatgctggactttaagggcaaggccaaatgcgcagcatggaccctccaaaaaaggttgtcaaaggaagatgcaacgagtgtctctatttctaaggcaaaagagccgatagaaaaataggacatttagaata

SEQ ID NO: 126 - protein, 86 aa, Artificial Sequence
  Description of Artifical Sequence:  Domain
MALQAEFDKAAEDVRKLPTRPADNKELKKLDGLYKQAIIGDINIEYLGMLDFKGKAKCAAWTLQKRLSKEDATSVSISKAKEPIEK

SEQ ID NO: 127 - DNA, 289 bp, Artificial Sequence
  Description of Artifical Sequence:  Primer/Probe
tgcggccgccaccaccatggcactgcaggctgatcgagacaaggctgcagaagacgtgaggaagctgccaacaagaccagatgagaaagaactgaaaaaactcgatggactttacaaacaagctataattggagacattaatattgagtatctgggaatgctggatttaaagggcaaggccaaatgcgcagcatggaccctccaaaaaaggttgtcaaaggaagatgcaacgagtgtctctatttctaaggcaaaagagccgatagaaaaataggacatttagaataca

SEQ ID NO: 128 - protein, 85 aa, Artificial Sequence
  Description of Artifical Sequence:  Domain
MALQADRDKAAEDVRKLPTRPDEKELKKLDGLYKQAIIGDINIEYLGMLDLKGKAKCAAWTLQKRLSKEDATSVSISKAKEPIEK

SEQ ID NO: 129 - DNA, 60 bp, Artificial Sequence
  Description of Artifical Sequence:  Primer/Probe
caagctataattggagacattaatattgagtatctgggaatgctggatttaaagggcaag

SEQ ID NO: 130 - protein, 20 aa, Artificial Sequence
  Description of Artifical Sequence:  Domain
QAIIGDINIEYLGMLDLKGK

SEQ ID NO: 131 - DNA, 54 bp, Artificial Sequence
  Description of Artifical Sequence:  Primer/Probe
caagctataattggagacattaatattgagtatctgggaatgctggactttaag

SEQ ID NO: 132 - protein, 18 aa, Artificial Sequence
  Description of Artifical Sequence:  Domain
QAIIGDINIEYLGMLDFK

SEQ ID NO: 133 - DNA, 6291 bp, Artificial Sequence
  Description of Artifical Sequence:  Primer/Probe
atggcgcggggggacgccggccgcggccgcgggctcctcgcgttgaccttctgcctgttggccgcgcgcggggagctgctgttgccccaggagacgactgtggagctgagctgtggagtggggccactgcaagtgatcctgggcccagagcaggctgcagtgctaaactgtagcctgggggctgctgccgctggaccccccaccagggtgacctggagcaaggatggggacaccctgctggagcacgaccacttacacctgctgcccaatggttccctgtggctgtcccagccactagcacccaatggcagtgacgagtcagtccctgaggctgtgggggtcattgaaggcaactattcgtgcctagcccacggccccctcggagtgctggccagccagactgctgtcgtcaagcttgccagtctcgcagacttctctctgcacccggagtctcagacggtggaggagaacgggacagctcgctttgagtgccacattgaagggctgccagctcccatcattacttgggagaaggaccaggtgacattgcctgaggagcctcggctcatcgtgcttcccaacggcgtccttcagatcctggatgttcaggagagtgatgcaggcccctaccgctgcgtggccaccaactcagctcgccagcacttcagccaggaggccctactcagtgtggcccacagaggttccctggcgtccaccagggggcaggacgtggtcattgtggcagccccagagaacaccacagtggtgtctggccagagtgtggtgatggaatgtgtggcctcagctgaccccaccccttttgtgtcctgggtccgagacgggaagcccatctccacagatgtcatcgtcctgggccgcaccaacctactaattgccaacgcgcagccctggcactccggcgtctatgtctgccgcgccaacaagccccgcacgcgcgacttcgccactgcagccgctgagctccgtgtgctgctagcggctcccgccatcactcaggcgcccgaggcgctgtcgcggacgcgggcgagcacagcgcgcttcgtgtgccgcgcgtcgggggagccgcggccagcgctgcgctggctgcacaacggggcgccgctgcggcccaacgggcgcgtcaaggtccagggcggcggtggcagcctggtcatcacacagatcggcctgcaggacgccggctactaccagtgcgtggctgagaacagcgcgggaatggcgtgcgctgccgcgtcgctggccgtggtggtgcgcgaggggctgcccagcgcccccacgcgggtcactgctacgccactgagcagctccgctgtgttggtggcctgggagcggcccgagatgcacagcgagcagatcatcggcttctctctccactaccagaaggcacggggtatggacaatgtggaataccagtttgcagtgaacaacgacaccacagaactacaggttcgggacctggaacccaacacagattatgagttctacgtggtggcctactcccagctgggagccagccgcacctccaccccagcactggtgcacacactggatgatgtccccagtgcagcaccccagctctccctgtccagccccaacccttcggacatcagggtggcgtggctgcccctgccccccagcctgagcaatgggcaggtggtgaagtacaagatagaatacggtttgggaaaggaaggtgagtggggggatcagattttctctactgaggtgcgaggaaatgagacacagcttatgctgaactcgcttcagccaaacaaggtgtatcgagtacggatttcggctggtacagcagccggcttcggggccccctcccagtggatgcatcacaggacgcccagtatgcacaaccagagccatgtcccttttgcccctgcagagttgaaggtgcaggcaaagatggagtccctggtcgtgtcatggcagccaccccctcaccccacccagatctctggctacaaactatattggcgggaggtgggggctgaggaggaggccaatggcgatcgcctgccagggggccgtggagaccaggcttgggatgtggggcctgtccggctcaagaagaaagtgaagcagtatgagctgacccagctagtccctggccggctgtacgaggtgaagctcgtggctttcaacaaacatgaggatggctatgcagcagtgtggaagggcaagacggagaaggcgccggcaccagacatgcctatccagaggggaccacccctgcctccagcccacgtccatgcggaatcaaacagctccacatccatctggcttcggtggaaaaagccagatttcaccacagtcaagattgtcaactacactgtgcgcttcagcccctgggggctcaggaatgcctccctggtcacctattacaccagttctggagaagacatcctcattggcggcttgaagccattcaccaaatacgagtttgcagtgcagtctcacggcgtggacatggatgggcctttcggctctgtggtggagcgctccaccctgcctgaccggccctccacacccccatccgacctgcgactgagccccctgacaccgtccacggttcggctgcactggtgcccccccacagagcccaacggggagatcgtggagtatctgatcctgtacagcagcaaccacacgcagcctgagcaccagtggaccttgctcaccacgcagggaaacatcttcagtgctgaggtccatggcctggagagcgacactcggtacttcttcaagatgggggcgcgcacagaggtgggacctgggcctttctcccgcctgcaggatgtgatcacgctccaggagaagctgtcagactcgctggacatgcactcagtcacgggcatcatcgtgggtgtctgcctgggcctcctctgcctcctggcctgcatgtgtgctggcctgcgccgcagcccccacagggaatccctcccaggcctgtcctccaccgccacccccgggaatcccgcgctgtactccagagctcggcttggcccccccagccccccagctgcccatgaattggagtcccttgtgcacccccatccccaggactggtccccgccaccctcagacgtggaggacagggctgaagtgcacagccttatgggtggcggtgtttctgaaggccggagtcactccaaaagaaagatctcctgggctcaaccaagcgggctgagctgggctggttcctgggcaggctgtgagctgccccaggcaggcccccggccggctctgacccgggccctgctgccccctgctggaactgggcagacgctgttgctgcaggctctggtgtacgacgccataaagggcaatgggaggaagaagtcacccccagcctgcaggaaccaggtggaggctgaagtcattgtccactctgactttagtgcatctaacgggaaccctgacctccatctccaagacctggagcctgaggaccccctgcctccagaggctcctgatctcatctcgggtgttggggatccagggcagggggcagcctggctggacagggagttgggagggtgtgagctggcagcccccgggccagacagacttacctgcttgccagaggcagccagtgcttcctgctcctacccggacctccagccaggcgaggtgctagaggagacccctggagatagctgccagctcaaatccccctgccctctaggagccagcccaggcctgcccagatccccggtctcctcctctgcctagctcttcccagaggatgtggtttggggcaggcaggtatggatcacataggatgcgatacctgtggccgtgtatgtccacatgtgtgcctgtagatacatcatcaagccctttggagcttcctaagttgctttggctgaggggagaggaaaacatggattattcactccccccatactctttgtgatacacatgtgacatgtgaaagacatacgagacatagctacatgtgatgtgcacatgtgtgaagtgcatgtatgcgtactggttgttgagctgggaaaccgtggcccaggcagtggtcactacagcctgattggtcctccaggtcagaacggtgccccacagtggtcagtccccagccctgtgggcccccacctccatcgcccagccttttattacacactctgagagtgtctccaatgcctgtctgacaaagacagtcccagcccattctcctgtctggctgggttgggtgcaagcaggctctgaatgcctggcatttcagctgcatcacctcccagctccttattgcccaaatagagagggtggccctggctcccctccgagcaactctgcatttaattttgtaatctgggaagtgcctggttttgaaaatccgctttctctcactcttcccctccttccttgcccctggctgctctagtgttctgtctcccagtcacctcgctctcccagcaccagtgcccttctcctgctcccagatactctttcctttcctctctcctgttttccttcctctgctatctctcacacctctcccagactatgtcatcttgttctcctgcctgggttcaaactctgcatccttctctaacaacgtgactacctcatgtctgcttcaaggcccccgtgcccttcctgtatccgcggctgccgcgcactcgcctgccatcctcctgcctcctcttcactcagtgcttctgcttgccctgccccaggcagcccacccacgcccagtgcgggtgtggagaagatcttctggcttccctgcatcttgcctttgggattgggatccaagggttctccatggatggatccaagtcatagaggggaatgtttgagacagggaagggggctgtgatccagaggctcagaataaaaagatgccctcccttctatgcaggggggcaagtttactggatggagatgatttgggcctctcttccagaagaagctaaaggaagagaaggggagtgagagttcagggaggcccttcccaccctgtgaggcttgacttgatctggattggggatgacaggaatctcaccctctggggtgctggcaaggaggtctttgcacaggaaaaggggtagctcatttcagtttgttttttctttaaattgaatcctcaagtcattttctgttcacctgccgcacagggacaagcttgacttctattttctgtgtagtgaaaacaatgtcatttatttggtttttcacctcagccctctcataggagcatagaatgttagggtctttactccctaatgatgtctgattggcacatcaagagttaactctgccttctgggccaaattcgaaataaccagtccatttttccttttttttttttttttttttttttaaatggtggaatgtctctcagcacagttgcggcttcctcaaaccctgaaagcatctgtgtttattatactcgggtgtcactcactgttgatgtctgcacctacgtttccacctcctccccctccttcagccagcctatgataacactaaagattattaatgttggttttgtatctcgttaaagacagaattgtcacttgtagtatttctgtagcattcagcgctgctgtggctaacaccactgtgtatgtttcatcattgctctgaaggtcaaaagcctcattttattttgctggtttgattttttttttttaaagaagaaaaaaaaactgccctgaattaaatggctgttttaacagtaggctcttagcattataccacatagtcatttttcatgttcttgtttaacaggcactgaggttctggtttaaattaaatagctgcaaatgagacaatttataacccattaggttgggtggaaaattgtttctcaaaagcaaataagtaataaatctggtatctgcctataactcacagttgataagaaagtggccatttctcactagcactatatatgatttgggctctgggtaatttggaagtgttaggtttgtgtctttgtagcagtatttttattagaaaagaatctattggccttttacagggtattaatccctttgtcacctaccattgatgccttaagttttctgagtctcaattaaaaatcttccttttcttgatgcatgacaagtgtaatcagtacttgctcatttatttgtctgtatttagtttatgctgtactatttaattatccttccagcgttttttttttctccttacaaatatgatactctttagtgttaagctaaggcattgattcatgtatctgtccttataatgaattaataaactattttccag

SEQ ID NO: 134 - protein, 1254 aa, Artificial Sequence
  Description of Artifical Sequence:  Domain
MARGDAGRGRGLLALTFCLLAARGELLLPQETTVELSCGVGPLQVILGPEQAAVLNCSLGAAAAGPPTRVTWSKDGDTLLEHDHLHLLPNGSLWLSQPLAPNGSDESVPEAVGVIEGNYSCLAHGPLGVLASQTAVVKLASLADFSLHPESQTVEENGTARFECHIEGLPAPIITWEKDQVTLPEEPRLIVLPNGVLQILDVQESDAGPYRCVATNSARQHFSQEALLSVAHRGSLASTRGQDVVIVAAPENTTVVSGQSVVMECVASADPTPFVSWVRDGKPISTDVIVLGRTNLLIANAQPWHSGVYVCRANKPRTRDFATAAAELRVLLAAPAITQAPEALSRTRASTARFVCRASGEPRPALRWLHNGAPLRPNGRVKVQGGGGSLVITQIGLQDAGYYQCVAENSAGMACAAASLAVVVREGLPSAPTRVTATPLSSSAVLVAWERPEMHSEQIIGFSLHYQKARGMDNVEYQFAVNNDTTELQVRDLEPNTDYEFYVVAYSQLGASRTSTPALVHTLDDVPSAAPQLSLSSPNPSDIRVAWLPLPPSLSNGQVVKYKIEYGLGKEGEWGDQIFSTEVRGNETQLMLNSLQPNKVYRVRISAGTAAGFGAPSQWMHHRTPSMHNQSHVPFAPAELKVQAKMESLVVSWQPPPHPTQISGYKLYWREVGAEEEANGDRLPGGRGDQAWDVGPVRLKKKVKQYELTQLVPGRLYEVKLVAFNKHEDGYAAVWKGKTEKAPAPDMPIQRGPPLPPAHVHAESNSSTSIWLRWKKPDFTTVKIVNYTVRFSPWGLRNASLVTYYTSSGEDILIGGLKPFTKYEFAVQSHGVDMDGPFGSVVERSTLPDRPSTPPSDLRLSPLTPSTVRLHWCPPTEPNGEIVEYLILYSSNHTQPEHQWTLLTTQGNIFSAEVHGLESDTRYFFKMGARTEVGPGPFSRLQDVITLQEKLSDSLDMHSVTGIIVGVCLGLLCLLACMCAGLRRSPHRESLPGLSSTATPGNPALYSRARLGPPSPPAAHELESLVHPHPQDWSPPPSDVEDRAEVHSLMGGGVSEGRSHSKRKISWAQPSGLSWAGSWAGCELPQAGPRPALTRALLPPAGTGQTLLLQALVYDAIKGNGRKKSPPACRNQVEAEVIVHSDFSASNGNPDLHLQDLEPEDPLPPEAPDLISGVGDPGQGAAWLDRELGGCELAAPGPDRLTCLPEAASASCSYPDLQPGEVLEETPGDSCQLKSPCPLGASPGLPRSPVSSSA

SEQ ID NO: 135 - DNA, 3741 bp, Artificial Sequence
  misc_feature (375): Wherein n is a or t or c or g.
  Description of Artifical Sequence:  Primer/Probe
atggcgcggggggacgccggccgcggccgcgggctcctcgcgttgaccttctgcctgttggccgcgcgcggggagctgctgttgccccaggagacgactgtggagctgagctgtggagtggggccactgcaagtgatcctgggcccagagcaggctgcagtgctaaactgtagcctgggggctgctgccgctggaccccccaccagggtgacctggagcaaggatggggacaccctgctggagcacgaccacttacacctgctggccaatggttccctgtggctgtcccagccactagcacccaatggcagtgacgagtcagtccctgaggctgtgggggtcattgaaggcaactattcgtgcctagcccacggnccccctcgagtgctggccagccagactgctgtcgtcaagcttgccagtctcgcagacttctctctgcacccggagtctcagacggtggaggagaacgggacagctcgctttgagtgccacattgaagggctgccagctcccatcattacttgggagaaggaccaggtgacattgcctgaggagcctcggctcatcgtgcttcccaacggcgtccttcagatcctggatgttcaggagagtgatgcaggcccctaccgctgcgtggccaccaactcagctcgccagcacttcagccaggaggccctactcagtgtggcccacagaggttccctggcgtccaccagggggcaggacgtggtcattgtggcagccccagagaacaccacagtggtgtctggccagagtgtggtgatggaatgtgtggcctcagctgaccccaccccttttgtgtcctgggtccgagacgggaagcccatctccacagatgtcatcgtcctgggccgcaccaacctactaattgccaacgcgcagccctggcactccggcgtctatgtctgccgcgccaacaagccccgcacgcgcgacttcgccactgcagccgctgagctccgtgtgctgctagcggctcccgccatcactcaggcgcccgaggcgctgtcgcggacgcgggcgagcacagcgcgcttcgtgtgccgcgcgtcgggggagccgcggccagcgctgcgctggctgcacaacggggcgccgctgcggcccaacgggcgcgtcaaggtccagggcggcggtggcagcctggtcatcacacagatcggcctgcaggacgccggctactaccagtgcgtggctgagaacagcgcgggaatggcgtgcgctgccgcgtcgctggccgtggtggtgcgcgaggggctgcccagcgcccccacgcgggtcactgctacgccactgagcagctccgctgtgttggtggcctgggagcggcccgagatgcacagcgagcagatcatcggcttctctctccactaccagaaggcacggggtatggacaatgtggaataccagtttgcagtgaacaacgacaccacagaactacaggttcgggacctggaacccaacacagattatgagttctacgtggtggcctactcccagctgggagccagccgcacctccaccccagcactggtgcacacactggatgatgtccccagtgcagcaccccagctctccctgtccagccccaacccttcggacatcagggtggcgtggctgcccctgccccccagcctgagcaatgggcaggtggtgaagtacaagatagaatacggtttgggaaaggaagatcagattttctctactgaggtgcgaggaaatgagacacagcttatgctgaactcgcttcagccaaacaaggtgtatcgagtacggatttcggctggtacagcagccggcttcggggccccctcccagtggatgcatcacaggacgcccagtatgcacaaccagagccatgtcccttttgcccctgcagagttgaaggtgcaggcaaagatggagtccctggtcgtgtcatggcagccaccccctcaccccacccagatctctggctacaaactatattggcgggaggtgggggctgaggaggaggccaatggcgatcgcctgccagggggccgtggagaccaggcttgggatgtggggcctgtccggctcaagaagaaagtgaagcagtatgagctgacccagctagtccctggccggctgtacgaggtgaagctcgtggctttcaacaaacatgaggatggctatgcagcagtgtggaagggcaagacggagaaggcgccggcaccagacatgcctatccagaggggaccacccctgcctccagcccacgtccatgcggaatcaaacagctccacatccatctggcttcggtggaaaaagccagatttcaccacagtcaagattgtcaactacactgtgcgcttcagcccctgggggctcaggaatgcctccctggtcacctattacagttctggagaagacatcctcattggcggcttgaagccattcaccaaatacgagtttgcagtgcagtctcacggcgtggacatggatgggcctttcggctctgtggtggagcgctccaccctgcctgaccgtccctccacacccccatccgacctgcgactgagccccctgacaccgtccacggttcggctgcactggtgcccccccacagagcccaacggggagatcgtggagtatctgatcctgtacagcagcaaccacacgcagcctgagcaccagtggaccttgctcaccacgcagggtgagggaaacatcttcagtgctgaggtccatggcctggagagcgacactcggtacttcttcaagatgggggcgcgcacagaggtgggacctgggcctttctcccgcctgcaggatgtgatcacgctccaggagaagctgtcagactcgctggacatgcactcagtcacgggcatcatcgtgggtgtctgcctgggcctcctctgcctcctggcctgcatgtgtgctggcctgcgccgcagcccccacagggaatccctcccaggcctgtcctccaccgccacccccgggaatcccgcgctgtactccagagctcggcttggcccccccagccccccagctgcccatgaattggagtcccttgtgcacccccatccccaggactggtccccgccaccctcagacgtggaggacagggctgaagtgcacagccttatgggtggcggtgtttctgaaggccggagtcactccaaaagaaaggtaagtgctcaaccaagcgggctgagctgggctggttcctgggcaggctgtgagctgccccaggcaggcccccggccggctctgacccgggccctgctgccccctgctggaactgggcagacgctgttgctgcaggttctctgctctgatcagggcaatgggaggaagaagtcacccccagcctgcaggaaccaggtggaggctgaagtcattgtccactctgactttagtgcatctaacgggaaccctgacctccatctccaagacctggagcctgaggaccccctgcctccagaggctcctgatctcatctcgggtgttggggatccagggcagggggcagcctggctggacagggagttgggagggtgtgagctggcagcccccgggccagacagacttacctgcttgccagaggcagccagtgcttcctgctcctacccggacctccagccaggcgaggtgctagaggagacccctggagatagctgccagctcaaatccccctgccctctaggagccagcccaggcctgcccagatccccggtctcctcctct

SEQ ID NO: 136 - protein, 1247 aa, Artificial Sequence
  Description of Artifical Sequence:  Domain
MARGDAGRGRGLLALTFCLLAARGELLLPQETTVELSCGVGPLQVILGPEQAAVLNCSLGAAAAGPPTRVTWSKDGDTLLEHDHLHLLANGSLWLSQPLAPNGSDESVPEAVGVIEGNYSCLAHGPPRVLASQTAVVKLASLADFSLHPESQTVEENGTARFECHIEGLPAPIITWEKDQVTLPEEPRLIVLPNGVLQILDVQESDAGPYRCVATNSARQHFSQEALLSVAHRGSLASTRGQDVVIVAAPENTTVVSGQSVVMECVASADPTPFVSWVRDGKPISTDVIVLGRTNLLIANAQPWHSGVYVCRANKPRTRDFATAAAELRVLLAAPAITQAPEALSRTRASTARFVCRASGEPRPALRWLHNGAPLRPNGRVKVQGGGGSLVITQIGLQDAGYYQCVAENSAGMACAAASLAVVVREGLPSAPTRVTATPLSSSAVLVAWERPEMHSEQIIGFSLHYQKARGMDNVEYQFAVNNDTTELQVRDLEPNTDYEFYVVAYSQLGASRTSTPALVHTLDDVPSAAPQLSLSSPNPSDIRVAWLPLPPSLSNGQVVKYKIEYGLGKEDQIFSTEVRGNETQLMLNSLQPNKVYRVRISAGTAAGFGAPSQWMHHRTPSMHNQSHVPFAPAELKVQAKMESLVVSWQPPPHPTQISGYKLYWREVGAEEEANGDRLPGGRGDQAWDVGPVRLKKKVKQYELTQLVPGRLYEVKLVAFNKHEDGYAAVWKGKTEKAPAPDMPIQRGPPLPPAHVHAESNSSTSIWLRWKKPDFTTVKIVNYTVRFSPWGLRNASLVTYYSSGEDILIGGLKPFTKYEFAVQSHGVDMDGPFGSVVERSTLPDRPSTPPSDLRLSPLTPSTVRLHWCPPTEPNGEIVEYLILYSSNHTQPEHQWTLLTTQGEGNIFSAEVHGLESDTRYFFKMGARTEVGPGPFSRLQDVITLQEKLSDSLDMHSVTGIIVGVCLGLLCLLACMCAGLRRSPHRESLPGLSSTATPGNPALYSRARLGPPSPPAAHELESLVHPHPQDWSPPPSDVEDRAEVHSLMGGGVSEGRSHSKRKVSAQPSGLSWAGSWAGCELPQAGPRPALTRALLPPAGTGQTLLLQVLCSDQGNGRKKSPPACRNQVEAEVIVHSDFSASNGNPDLHLQDLEPEDPLPPEAPDLISGVGDPGQGAAWLDRELGGCELAAPGPDRLTCLPEAASASCSYPDLQPGEVLEETPGDSCQLKSPCPLGASPGLPRSPVSSS

SEQ ID NO: 137 - DNA, 1609 bp, Artificial Sequence
  Description of Artifical Sequence:  Primer/Probe
ggtaccgcgtcgctggccgtggtggtgcgcgaggggctgcccagcgcccccacgcgggtcactgctacgccactgagcagctccgctgtgttggtggcctgggagcggcccgagatgcacagcgagcagatcatcggcttctctctccactaccagaaggcacggggcatggacaatgtggaataccagtttgcagtgaacaacgacaccacagaactacaggttcgggacctggaacccaacacagattatgagttctacgtggtggcctactcccagctgggagccagccgcacctccaccccagcactggtgcacacactggatgatgtccccagtgcagcaccccagctctccctgtccagccccaacccttcggacatcagggtggcgtggctgcccctgccccccagcctgagcaatgggcaggtggtgaagtacaagatagaatacggtttgggaaaggaagatcagattttctctactgaggtgcgaggaaatgagacacagcttatgctgaactcgcttcagccaaacaaggtgtatcgagtacggatttcggctggtacagcagccggcttcggggccccctcccagtggatgcatcacaggacgcccagtatgcacaaccagagccatgtcccttttgcccctgcagagttgaaggtgcaggcaaagatggagtccctggtcgtgtcatggcagccaccccctcaccccacccagatctctggctacaaactatattggcgggaggtgggggctgaggaggaggccaatggcgatcgcctgccagggggccgtggagaccaggcttgggatgtggggcctgtccggctcaagaagaaagtgaagcagtatgagctgacccagctagtccctggccggctgtacgaggtgaagctcgtggctttcaacaaacatgaggatggctatgcagcagtgtggaagggcaagacggagaaggcgccggcaccagacatgcctatccagaggggaccacccctgcctccagcccacgtccatgcggaatcaaacagctccacatccatctggcttcggtggaaaaagccagatttcaccacagtcaagattgtcaactacactgtgcgcttcagcccctgggggctcaggaatgcctccctggtcacctattacaccagttctggagaagacatcctcattggcggcttgaagccattcaccaaatacgagtttgcagtgcagtctcacggcgtggacatggatgggcctttcggctctgtggtggagcgctccaccctgcctgaccggccctccacacccccatccgacctgcgactgagccccctgacaccgtccacggttcggctgcactggtgcccccccacagagcccaacggggagatcgtggagtatctgatcctgtacagcagcaaccacacgcagcctgagcaccagtggaccttgctcaccacgcagggaaacatcttcagtgctgaggtccatggcctggagagcgacactcggtacttcttcaagatgggggcgcgcacagaggtgggacctgggcctttctcccgcctgcaggatgtgatcacgctccaggagaagctgtcagactcggtcg

SEQ ID NO: 138 - protein, 536 aa, Artificial Sequence
  Description of Artifical Sequence:  Domain
GTASLAVVVREGLPSAPTRVTATPLSSSAVLVAWERPEMHSEQIIGFSLHYQKARGMDNVEYQFAVNNDTTELQVRDLEPNTDYEFYVVAYSQLGASRTSTPALVHTLDDVPSAAPQLSLSSPNPSDIRVAWLPLPPSLSNGQVVKYKIEYGLGKEDQIFSTEVRGNETQLMLNSLQPNKVYRVRISAGTAAGFGAPSQWMHHRTPSMHNQSHVPFAPAELKVQAKMESLVVSWQPPPHPTQISGYKLYWREVGAEEEANGDRLPGGRGDQAWDVGPVRLKKKVKQYELTQLVPGRLYEVKLVAFNKHEDGYAAVWKGKTEKAPAPDMPIQRGPPLPPAHVHAESNSSTSIWLRWKKPDFTTVKIVNYTVRFSPWGLRNASLVTYYTSSGEDILIGGLKPFTKYEFAVQSHGVDMDGPFGSVVERSTLPDRPSTPPSDLRLSPLTPSTVRLHWCPPTEPNGEIVEYLILYSSNHTQPEHQWTLLTTQGNIFSAEVHGLESDTRYFFKMGARTEVGPGPFSRLQDVITLQEKLSDSV

SEQ ID NO: 139 - DNA, 1611 bp, Artificial Sequence
  Description of Artifical Sequence:  Primer/Probe
ggtaccgcgtcgctggccgtggtggtgcgcgaggggctgcccagcgcccccacgcgggtcactgctacgccactgagcagctccgctgtgttggtggcctgggagcggcccgagatgcccagcgagcagatcatcggcttctctctccactaccagaaggcacggggcatggacaatgtggaataccagtttgcagtgaacaacgacaccacagaactacaggttcgggacctggaacccaacacagattatgagttctacgtggtggcctactcccagctgggagccagccgcacctccaccccagcactggtgcacacactggatgatgtccccagtgcagcaccccagctctccctgtccagccccaacccttcggacatcagggtggcgtggctgcccctgccccccagcctgagcaatgggcaggtggtgaagtacaagatagaatacggtttgggaaaggaagatcagattttctctactgaggtgcgaggaaatgagacacagcttatgttgaactcgcttcagccaaacaaggtgtatcgagtacggatttcggctggtacagcagccggcttcggggccccctcccagtggatgcatcacaggacgcccagtatgcacaaccagagccatgtcccttttgcccctgcagagttgaaggtgcaggcaaagatggagtccctggtcgtatcatggcagccaccccctcaccccacccagatctctggctacaaactatattggcgggaggtgggggctgaggaggaggccaatggcgatcgcctgccagggggccgtggagaccaggcttgggatgtggggcctgtccggctcaagaagaaagtgaagcagtatgagctgacccagctagtccctggccggctgtacgaggtgaagctcgtggctttcaacaaacatgaggatggctatgcagcagtgtggaagggcaagacggagaaggcgccggcaccagacatgcctatccagaggggaccacccctgcctccagcccacgtccatgcggaatcaaacagctccacatccatctggcttcggtggaaaaagccagatttcaccacagtcaagattgtcaactacactgtgcgcttcagcccctgggggctcaggaatgcctccctggtcacctattacaccagttctggagaagacatcctcattggcggcttgaagccattcaccaaatacgagtttgcagtgcagtctcacggcgtggacatggatgggcctttcggctctgtggtggagcgctccaccctgcctgaccggccctccacacccccatccgacctgcgactgagccccctgacgccgtccacggttcggctgcactggtgcccccccacagagcccaacggggagatcgtggagtatctgatcctgtacagcagcaaccacacgcagcctgagcaccagtggaccttgctcaccacgcagggaaacatcttcagtgctgaggtccatggcctggagagcgacactcggtacttcttcaagatgggggcgcgcacagaggtgggacctgggcctttctcccgcctgcaggatgtgatcacgctccaggagaagctgtcagactcggtcgac

SEQ ID NO: 140 - protein, 537 aa, Artificial Sequence
  Description of Artifical Sequence:  Domain
GTASLAVVVREGLPSAPTRVTATPLSSSAVLVAWERPEMPSEQIIGFSLHYQKARGMDNVEYQFAVNNDTTELQVRDLEPNTDYEFYVVAYSQLGASRTSTPALVHTLDDVPSAAPQLSLSSPNPSDIRVAWLPLPPSLSNGQVVKYKIEYGLGKEDQIFSTEVRGNETQLMLNSLQPNKVYRVRISAGTAAGFGAPSQWMHHRTPSMHNQSHVPFAPAELKVQAKMESLVVSWQPPPHPTQISGYKLYWREVGAEEEANGDRLPGGRGDQAWDVGPVRLKKKVKQYELTQLVPGRLYEVKLVAFNKHEDGYAAVWKGKTEKAPAPDMPIQRGPPLPPAHVHAESNSSTSIWLRWKKPDFTTVKIVNYTVRFSPWGLRNASLVTYYTSSGEDILIGGLKPFTKYEFAVQSHGVDMDGPFGSVVERSTLPDRPSTPPSDLRLSPLTPSTVRLHWCPPTEPNGEIVEYLILYSSNHTQPEHQWTLLTTQGNIFSAEVHGLESDTRYFFKMGARTEVGPGPFSRLQDVITLQEKLSDSVD

SEQ ID NO: 141 - DNA, 1672 bp, Artificial Sequence
  Description of Artifical Sequence:  Primer/Probe
ggtaccgcgtcgctggccgtggtggtgcgcgaggggctgcccagcgcccccacgcgggtcactgctacgccactgagcagctccgctgtgttggtggcctgggagcggcccgagatgcccagcgagcagatcatcggcttctctctccactaccagaaggcacggggcatggacaatgtggaataccagtttgcagtgaacaacgacaccacagaactacaggttcgggacctggaacccaacacagattatgagttctacgtggtggcctactcccagctgggagccagccgcacctccaccccagcactggtgcacacactggatgatgtccccagtgcagcaccccagctctccctgtccagccccaacccttcggacatcagggtggcgtggctgcccctgccccccagcctgagcaatgggcaggtggtgaagtacaagatagaatacggtttgggaaaggaagatcagattttctctactgaggtgcgaggaaatgagacacagcttatgttgaactcgcttcagccaaacaaggtgtatcgagtacggatttcggctggtacagcagccggcttcggggccccctcccagtggatgcatcacaggacgcccagtatgcacaaccagagccatgtcccttttgcccctgcagagttgaaggtgcaggcaaggatggagtccctggtcgtgtcatggcagccaccccctcaccccacccagatctctggctacaaactatattggcgggaggtgggggctgaggaggaggccaatggcgatcgcctgccagggggccgtggagaccaggcttgggatgtggggcctgtccggctcaagaagaaagtgaagcagtatgagctgacccagctagtccctggccggctgtacgaggtgaagctcgtggctttcaacaaacatgaggatggctatgcagcagtgtggaagggcaagacggagaaggcgccggcaccagacatgcctatccagaggggaccacccctgcctccagcccacgtccatgcggaatcaaacagctccacatccatctggcttcggtggaaaaagccagatttcaccacagtcaagattgtcaactacactgtgcgcttcagcccctgggggctcaggaatgcctccctggtcacctattacaccagttctggagaagacatcctcattggcggcttgaagccattcaccaaatacgagtttgcagtgcagtctcacggcgtggacatggatgggcctttcggctctgtggtggagcgctccaccctgcctgaccggccctccacacccccatccgacctgcgactgagccccctgacgccgtccacggttcggctgcactggtgcccccccacagagcccaacggggagatcgtggagtatctgatcctgtacagcagcaaccacacgcagcctgagcaccagtggaccttgctcaccacgcagggaaacatcttcagtgctgaggtccatggcctggagagcgacactcggtacttcttcaagatgggggcgcgcacagaggtgggacctgggcctttctcccgcctgcaggatgtgatcacgctccaggagaagctgtcagactcggtcgacagcttctcctggagcgtgatcacagcccctcgcgcaccaccacggccagcgacgcggtacc

SEQ ID NO: 142 - protein, 557 aa, Artificial Sequence
  Description of Artifical Sequence:  Domain
GTASLAVVVREGLPSAPTRVTATPLSSSAVLVAWERPEMPSEQIIGFSLHYQKARGMDNVEYQFAVNNDTTELQVRDLEPNTDYEFYVVAYSQLGASRTSTPALVHTLDDVPSAAPQLSLSSPNPSDIRVAWLPLPPSLSNGQVVKYKIEYGLGKEDQIFSTEVRGNETQLMLNSLQPNKVYRVRISAGTAAGFGAPSQWMHHRTPSMHNQSHVPFAPAELKVQARMESLVVSWQPPPHPTQISGYKLYWREVGAEEEANGDRLPGGRGDQAWDVGPVRLKKKVKQYELTQLVPGRLYEVKLVAFNKHEDGYAAVWKGKTEKAPAPDMPIQRGPPLPPAHVHAESNSSTSIWLRWKKPDFTTVKIVNYTVRFSPWGLRNASLVTYYTSSGEDILIGGLKPFTKYEFAVQSHGVDMDGPFGSVVERSTLPDRPSTPPSDLRLSPLTPSTVRLHWCPPTEPNGEIVEYLILYSSNHTQPEHQWTLLTTQGNIFSAEVHGLESDTRYFFKMGARTEVGPGPFSRLQDVITLQEKLSDSVDSFSWSVITAPRAPPRPATRY

SEQ ID NO: 143 - DNA, 1611 bp, Artificial Sequence
  Description of Artifical Sequence:  Primer/Probe
ggtaccgcgtcgctggccgtggtggtgcgcgaggggctgcccagcgcccccacgcgggtcactgctacgccactgagcagctccgctgtgttggtggcctgggagcggcccgagatgcccagcgagcagatcatcggcttctctctccactaccagaaggcacggggcatggacaatgtggaataccagtttgcagtgaacaacgacaccacagaactacaggttcgggacctggaacccaacacagattatgagttctacgtggtggcctactcccagctgggagccagccgcacctccaccccagcactggtgcacacactggatgatgtccccagtgcagcaccccagctctccctgtccagccccaacccttcggacatcagggtggcgtggctgcccctgccccccagcctgagcaatgggcaggtggtgaagtacaagatagaatacggtttgggaaaggaagatcagattttctctactgaggtgcgaggaaatgagacacagcttatgttgaactcgcttcagccaaacaaggtgtatcgagtacggatttcggctggtacagcagccggcttcggggccccctcccagtggatgcatcacaggacgcccagtatgcacaaccagagccatgtcccttttgcccctgcagagttgaaggtgcaggcaaagatggagtccctggtcgtgtcatggcagccaccccctcaccccacccagatctctggctacaaactatattggcgggaggtgggggctgaggaggaggccaatggcgatcgcctgccagggggccgtggagaccaggcttgggatgtggggcctgtccggctcaagaagaaagtgaagcagtatgagctgacccagctagtccctggccggctgtacgaggtgaagctcgtggctttcaacaaacatgaggatggctatgcagcagtgtggaagggcaagacggagaaggcgccggcaccagacatgcctatccagaggggaccacccctgcctccagcccacgtccatgcggaatcaaacagctccacatccatctggcttcggtggaaaaagccagatttcaccacagtcaagattgtcaactacactgtgcgcttcagcccctgggggctcaggaatgcctccctggtcacctattacaccagttctggagaagacatcctcattggcggcttgaagccattcaccaaatacgagtttgcagtgcagtctcacggcgtggacatggatgggcctttcggctctgtggtggagcgctccaccctgcctgaccggccctccacacccccatccgacctgcgactgagccccctgacgccgtccacggttcggctgcactggtgcccccccacagagcccaacggggagatcgtggagtatctgatcctgtacagcagcaaccacacgcagcctgagcaccagtggaccttgctcaccacgcagggaaacatcttcagtgctgaggtccatggcctggagagcgacactcggtacttcttcaagatgggggcgcgcacagaggtgggacctgggcctttctcccgcctgcaggatgtgatcacgctccaggagaagctgtcagactcggtcgac

SEQ ID NO: 144 - protein, 537 aa, Artificial Sequence; identical to SEQ ID NO: 140
  Description of Artifical Sequence:  Domain

SEQ ID NO: 145 - DNA, 1611 bp, Artificial Sequence; identical to SEQ ID NO: 139
  Description of Artifical Sequence:  Primer/Probe

SEQ ID NO: 146 - protein, 533 aa, Artificial Sequence
  Description of Artifical Sequence:  Domain
ASLAVVVREGLPSAPTRVTATPLSSSAVLVAWERPEMPSEQIIGFSLHYQKARGMDNVEYQFAVNNDTTELQVRDLEPNTDYEFYVVAYSQLGASRTSTPALVHTLDDVPSAAPQLSLSSPNPSDIRVAWLPLPPSLSNGQVVKYKIEYGLGKEDQIFSTEVRGNETQLMLNSLQPNKVYRVRISAGTAAGFGAPSQWMHHRTPSMHNQSHVPFAPAELKVQAKMESLVVSWQPPPHPTQISGYKLYWREVGAEEEANGDRLPGGRGDQAWDVGPVRLKKKVKQYELTQLVPGRLYEVKLVAFNKHEDGYAAVWKGKTEKAPAPDMPIQRGPPLPPAHVHAESNSSTSIWLRWKKPDFTTVKIVNYTVRFSPWGLRNASLVTYYTSSGEDILIGGLKPFTKYEFAVQSHGVDMDGPFGSVVERSTLPDRPSTPPSDLRLSPLTPSTVRLHWCPPTEPNGEIVEYLILYSSNHTQPEHQWTLLTTQGNIFSAEVHGLESDTRYFFKMGARTEVGPGPFSRLQDVITLQEKLSDS

SEQ ID NO: 147 - DNA, 1672 bp, Artificial Sequence; identical to SEQ ID NO: 141
  Description of Artifical Sequence:  Primer/Probe

SEQ ID NO: 148 - protein, 533 aa, Artificial Sequence
  Description of Artifical Sequence:  Domain
ASLAVVVREGLPSAPTRVTATPLSSSAVLVAWERPEMPSEQIIGFSLHYQKARGMDNVEYQFAVNNDTTELQVRDLEPNTDYEFYVVAYSQLGASRTSTPALVHTLDDVPSAAPQLSLSSPNPSDIRVAWLPLPPSLSNGQVVKYKIEYGLGKEDQIFSTEVRGNETQLMLNSLQPNKVYRVRISAGTAAGFGAPSQWMHHRTPSMHNQSHVPFAPAELKVQARMESLVVSWQPPPHPTQISGYKLYWREVGAEEEANGDRLPGGRGDQAWDVGPVRLKKKVKQYELTQLVPGRLYEVKLVAFNKHEDGYAAVWKGKTEKAPAPDMPIQRGPPLPPAHVHAESNSSTSIWLRWKKPDFTTVKIVNYTVRFSPWGLRNASLVTYYTSSGEDILIGGLKPFTKYEFAVQSHGVDMDGPFGSVVERSTLPDRPSTPPSDLRLSPLTPSTVRLHWCPPTEPNGEIVEYLILYSSNHTQPEHQWTLLTTQGNIFSAEVHGLESDTRYFFKMGARTEVGPGPFSRLQDVITLQEKLSDS

SEQ ID NO: 149 - DNA, 1887 bp, Artificial Sequence
  Description of Artifical Sequence:  Primer/Probe
gcgcacggcctgtccgctgcacaccagcttgttggcgtcttcgtcgccgcgctcgccccgggctactcctgcgcgccacaatgagctcccgcatcgccagggcgctcgccttagtcgtcacccttctccacttgaccaggctggcgctctccacctgccccgctgcctgccactgccccctggaggcgcccaagtgcgcgccgggagtcgggctggtccgggacggctgcggctgctgtaaggtctgcgccaagcagctcaacgaggactgcagcaaaacgcagccctgcgaccacaccaaggggctggaatgcaacttcggcgccagctccaccgctctgaaggggatctgcagagctcagtcagagggcagaccctgtgaatataactccagaatctaccaaaacggggaaagtttccagcccaactgtaaacatcagtgcacatgtattgatggcgccgtgggctgcattcctctgtgtccccaagaactatctctccccaacttgggctgtcccaaccctcggctggtcaaagttaccgggcagtgctgcgaggagtgggtctgtgacgaggatagtatcaaggaccccatggaggaccaggacggcctccttggtaaggagctgggattcgatgcctccgaggtggagttgacgagaaacaatgaattgattgcagttggaaaaggcagctcactgaagcggatccctgtttttggaatggagcctcgcatccgatacaaccctttacaaggccagaaatgtattgttcaaacaacttcatggtcccagtgctcaaagacctgtggaactggtatctccacacgagttaccaatgacaaccctgagtgccgccttgtgaaagaaacccggatttgtgaggtgcggccttgtggacagccagtgtacagcagcctgaaaaagggcaagaaatgcagcaagaccaagaaatcccccgaaccagtcaggtttacttacgctggatgtttgagtgtgaagaaataccggcccaagtactgcggttcctgcgtggacggccgatgctgcacgccccagctgaccaggactgtgaagatgcggttccgctgcgaagatggggagacattttccaagaacgtcatgatgatccagtcctgcaaatgcaactacaactgcccgcatgccaatgaagcagcgtttcccttctacaggctgttcaatgacattcacaaatttagggactaaatgctacctgggtttccagggcacacctagacaaacaagggagaagagtgtcagaatcagaatcatggagaaaatgggcgggggtggtgtgggtgatgggactcattgtagaaaggaagccttgctcattcttgaggagcattaaggtatttcgaaactgccaagggtgctggtgcggatggacactaatgcagccacgattggagaatactttgcttcatagtattggagcacatgttactgcttcattttggagcttgtggagttgatgactttctgttttctgtttgtaaattatttgctaagcatattttctctaggcttttttccttttggggttctacagtcgtaaaagagataataagattagttggacagtttaaagcttttattcgtcctttgacaaaagtaaatgggagggcattccatcccttcctgaagggggacactccatgagtgtctgtgagaggcagctatctgcactctaaactgcaaacagaaatcaggtgttttaagactgaatgttttatttatcaaaatgtagcttttggggagggaggggaaatgtaatactggaataatttgtaaatgattttaattttatattcagtgaaaagattttatttatggaattaaccatttaataaagaaatatttacct

SEQ ID NO: 150 - protein, 381 aa, Artificial Sequence
  Description of Artifical Sequence:  Domain
MSSRIARALALVVTLLHLTRLALSTCPAACHCPLEAPKCAPGVGLVRDGCGCCKVCAKQLNEDCSKTQPCDHTKGLECNFGASSTALKGICRAQSEGRPCEYNSRIYQNGESFQPNCKHQCTCIDGAVGCIPLCPQELSLPNLGCPNPRLVKVTGQCCEEWVCDEDSIKDPMEDQDGLLGKELGFDASEVELTRNNELIAVGKGSSLKRIPVFGMEPRIRYNPLQGQKCIVQTTSWSQCSKTCGTGISTRVTNDNPECRLVKETRICEVRPCGQPVYSSLKKGKKCSKTKKSPEPVRFTYAGCLSVKKYRPKYCGSCVDGRCCTPQLTRTVKMRFRCEDGETFSKNVMMIQSCKCNYNCPHANEAAFPFYRLFNDIHKFRD

SEQ ID NO: 151 - DNA, 1158 bp, Artificial Sequence
  Description of Artifical Sequence:  Primer/Probe
agatctaccatgagctcccgcatcgccagggcgctcgccttagtcgtcacccttctccacttgaccaggctggcgctctccacctgccccgctgcctgccactgccccctggaggcgcccaagtgcgcgccgggagtcgggctggtccgggacggctgcggctgctgtaaggtctgcgccaagcagctcaacgaggactgcagcaaaacgcagccctgcgaccacaccaaggggctggaatgcaacttcggcgccagctccaccgctctgaaggggatctgcagagctcagtcagagggcagaccctgtgaatataactccagaatctaccaaaacggggaaagtttccagcccaactgtaaacatcagtgcacatgtattgatggcgccgtgggctgcattcctctgtgtccccaagaactatctctccccaacttgggctgtcccaaccctcggctggtcaaagttaccgggcagtgctgcgaggagtgggtctgtgacgaggatagtatcaaggaccccatggaggaccaggacggcctccttggcaaggagctgggattcgatgcctccgaggtggagttgacgagaaacaatgaattgattgcagttggaaaaggcagctcactgaagcggctccctgtttttggaatggagcctcgcatcctatacaaccctttacaaggccagaaatgtattgttcaaacaacttcatggtcccagtgctcaaagacctgtggaactggtatctccacacgagttaccaatgacaaccctgagtgccgccttgtgaaagaaacccggatttgtgaggtgcggccttgtggacagccagtgtacagcagcctgaaaaagggcaagaaatgcagcaagaccaagaaatcccccgaaccagtcaggtttacttacgctggatgtttgagtgtgaagaaataccggcccaagtactgcggttcctgcgtggacggccgatgctgcacgccccagctgaccaggactgtgaagatgcggttccgctgcgaagatggggagacattttccaagaacgtcatgatgatccagtcctgcaaatgcaactacaactgcccgcatgccaatgaagcagcgtttcccttctacaggctgttcaatgacattcacaaatttagggacctcgag

SEQ ID NO: 152 - protein, 386 aa, Artificial Sequence
  Description of Artifical Sequence:  Domain
RSTMSSRIARALALVVTLLHLTRLALSTCPAACHCPLEAPKCAPGVGLVRDGCGCCKVCAKQLNEDCSKTQPCDHTKGLECNFGASSTALKGICRAQSEGRPCEYNSRIYQNGESFQPNCKHQCTCIDGAVGCIPLCPQELSLPNLGCPNPRLVKVTGQCCEEWVCDEDSIKDPMEDQDGLLGKELGFDASEVELTRNNELIAVGKGSSLKRLPVFGMEPRILYNPLQGQKCIVQTTSWSQCSKTCGTGISTRVTNDNPECRLVKETRICEVRPCGQPVYSSLKKGKKCSKTKKSPEPVRFTYAGCLSVKKYRPKYCGSCVDGRCCTPQLTRTVKMRFRCEDGETFSKNVMMIQSCKCNYNCPHANEAAFPFYRLFNDIHKFRDLE

SEQ ID NO: 153 - DNA, 204 bp, Artificial Sequence
  Description of Artifical Sequence:  Primer/Probe
agatcttgtgaatataactccagaatctaccaaaacggggaaagtttccagcccaactgtaaacatcagtgcacatgtattgatggcgccgtgggctgcattcctctgtgtccccaagaactatctctccccaacttgggctgtcccaaccctcggctggtcaaagttaccgggcagtgctgcgaggagtgggtctgtctcgag

SEQ ID NO: 154 - protein, 68 aa, Artificial Sequence
  Description of Artifical Sequence:  Domain
RSCEYNSRIYQNGESFQPNCKHQCTCIDGAVGCIPLCPQELSLPNLGCPNPRLVKVTGQCCEEWVCLE

SEQ ID NO: 155 - DNA, 228 bp, Artificial Sequence
  Description of Artifical Sequence:  Primer/Probe
agatcttgccccgctgcctgccactgccccctggaggcgcccaagtgcgcgccgggagtcgggctggtccgggacggctgcggctgctgtaaggtctgcgccaagcagctcaacgaggactgcagcaaaacgcagccctgcgaccacaccaaggggctggaatgcaacttcggcgccagctccaccgctctgaaggggatctgcagagctcagtcagagggcctcgag

SEQ ID NO: 156 - protein, 76 aa, Artificial Sequence
  Description of Artifical Sequence:  Domain
RSCPAACHCPLEAPKCAPGVGLVRDGCGCCKVCAKQLNEDCSKTQPCDHTKGLECNFGASSTALKGICRAQSEGLE

SEQ ID NO: 157 - DNA, 228 bp, Artificial Sequence; identical to SEQ ID NO: 155
  Description of Artifical Sequence:  Primer/Probe

SEQ ID NO: 158 - protein, 76 aa, Artificial Sequence; identical to SEQ ID NO: 156
  Description of Artifical Sequence:  Domain

SEQ ID NO: 159 - DNA, 1228 bp, Artificial Sequence
  Description of Artifical Sequence:  Primer/Probe
tgtacaagaaagctgggtcggcgcgcccacccttcaccaccatgagctcccgcatcgccagggcgctcgccttagtcgtcacccttctccacttgaccaggctggcgctctccacctgccccgctgcctgccactgccccctggaggcgcccaagtgcgcgccgggagtcgggctggtccgggacggctgcggctgctgtaaggtctgcgccaagcagctcaacgaggactgcagcaaaacgcagccctgcgaccacaccaaggggctggaatgcaacttcggcgccagctccaccgctctgaaggggatctgcagagctcagtcagagggcagaccctgtgaatataactccagaatctaccaaaacggggaaagtttccagcccaactgtaaacatcagtgcacatgtattgatggcgccgtgggctgcattcctctgtgtccccaagaactatctctccccaacttgggctgtcccaaccctcggctggtcaaagttaccgggcagtgctgcgaggagtgggtctgtgacgaggatagtatcaaggaccccatggaggaccaggacggcctccttggcaaggagctgggattcgatgcctccgaggtggagttgacgagaaacaatgaattgattgcagttggaaaaggcagctcactgaagcggctccctgtttttggaatggagcctcgcatcctatacaaccctttacaaggccagaaatgtattgttcaaacaacttcatggtcccagtgctcaaagacctgtggaactggtatctccacacgagttaccaatgacaaccctgagtgccgccttgtgaaagaaacccggatttgtgaggtgcggccttgtggacagccagtgtacagcagcctgaaaaagggcaagaaatgcagcaagaccaagaaatcccccgaaccagtcaggtttacttacgctggatgtttgagtgtgaagaaataccggcccaagtactgcggttcctgcgtggacggccgatgctgcacgccccagctgaccaggactgtgaagatgcggttccgctgcgaagatggggagacattttccaagaacgtcatgatgatccagtcctgcaaatgcaactacaactgcccgcatgccaatgaagcagcgtttcccttctacaggctgttcaatgacattcacaaatttagggacaagggtgggcgcgccctttctcgagtacggcggccgcggagcct

SEQ ID NO: 160 - protein, 408 aa, Artificial Sequence
  Description of Artifical Sequence:  Domain
YKKAGSARPPFTTMSSRIARALALVVTLLHLTRLALSTCPAACHCPLEAPKCAPGVGLVRDGCGCCKVCAKQLNEDCSKTQPCDHTKGLECNFGASSTALKGICRAQSEGRPCEYNSRIYQNGESFQPNCKHQCTCIDGAVGCIPLCPQELSLPNLGCPNPRLVKVTGQCCEEWVCDEDSIKDPMEDQDGLLGKELGFDASEVELTRNNELIAVGKGSSLKRLPVFGMEPRILYNPLQGQKCIVQTTSWSQCSKTCGTGISTRVTNDNPECRLVKETRICEVRPCGQPVYSSLKKGKKCSKTKKSPEPVRFTYAGCLSVKKYRPKYCGSCVDGRCCTPQLTRTVKMRFRCEDGETFSKNVMMIQSCKCNYNCPHANEAAFPFYRLFNDIHKFRDKGGRALSRVRRPRS

SEQ ID NO: 161 - DNA, 1111 bp, Artificial Sequence
  Description of Artifical Sequence:  Primer/Probe
aggctccgcggccgcccccttcaccacctgccccgctgcctgccactgccccctggaggcgcccaagtgcgcgccgggagtcgggctggtccgggacggctgcggctgctgtaaggtctgcgccaagcagctcaacgaggactgcagcaaaacgcagccctgcgaccacaccaaggggctggaatgcaacttcggcgccagctccaccgctctgaaggggatctgcagagctcagtcagagggcagaccctgtgaatataactccagaatctaccaaaacggggaaagtttccagcccaactgtaaacatcagtgcacatgtattgatggcgccgtgggctgcattcctctgtgtccccaagaactatctctccccaacttgggctgtcccaaccctcggctggtcaaagttaccgggcagtgctgcgaggagtgggtctgtgacgaggatagtatcaaggaccccatggaggaccaggacggcctccttggcaaggagctgggattcgatgcctccgaggtggagttaacgagaaacaatgaattgattgcagttggaaaaggcagctcactgaagcggctccctgtttttggaatggagcctcgcatcctatacaaccctttacaaggccagaaatgtattgttcaaacaacttcatggtcccagtgctcaaagacctgtggaactggtatctccacacgagttaccaatgacaaccctgagtgccgccttgtgaaagaaacccggatttgtgaggtgcggccttgtggacagccagtgtacagcagcctgaaaaagggcaagaaatgcagcaagaccaagaaatcccccgaaccagtcaggtttacttacgctggatgtttgagtgtgaagaaataccggcccaagtactgcggttcctgcgtggacggccgatgctgcacgccccagctgaccaggactgtgaagatgcggttccgctgcgaagatggggagacattttccaagaacgtcatgatgatccagtcctgcaaatgcaactacaactgcccgcatgccaatgaagcagcgtttcccttctacaggctgttcaatgacattcacaaatttagggacaagggtgggcgcgcc

SEQ ID NO: 162 - protein, 370 aa, Artificial Sequence
  Description of Artifical Sequence:  Domain
GSAAAPFTTCPAACHCPLEAPKCAPGVGLVRDGCGCCKVCAKQLNEDCSKTQPCDHTKGLECNFGASSTALKGICRAQSEGRPCEYNSRIYQNGESFQPNCKHQCTCIDGAVGCIPLCPQELSLPNLGCPNPRLVKVTGQCCEEWVCDEDSIKDPMEDQDGLLGKELGFDASEVELTRNNELIAVGKGSSLKRLPVFGMEPRILYNPLQGQKCIVQTTSWSQCSKTCGTGISTRVTNDNPECRLVKETRICEVRPCGQPVYSSLKKGKKCSKTKKSPEPVRFTYAGCLSVKKYRPKYCGSCVDGRCCTPQLTRTVKMRFRCEDGETFSKNVMMIQSCKCNYNCPHANEAAFPFYRLFNDIHKFRDKGGRA

SEQ ID NO: 163 - DNA, 1068 bp, Artificial Sequence
  Description of Artifical Sequence:  Primer/Probe
acctgccccgctgcctgccactgccccctggaggcgcccaagtgcgcgccgggagtcgggctggtccgggacggctgcggctgctgtaaggtctgcgccaagcagctcaacgaggactgcagcaaaacgcagccctgcgaccacaccaaggggctggaatgcaacttcggcgccagctccaccgctctgaaggggatctgcagagctcagtcagagggcagaccctgtgaatataactccagaatctaccaaaacggggaaagtttccagcccaactgtaaacatcagtgcacatgtattgatggcgccgtgggctgcattcctctgtgtccccaagaactatctctccccaacttgggctgtcccaaccctcggctggtcaaagttaccgggcagtgctgcgaggagtgggtctgtgacgaggatagtatcaaggaccccatggaggaccaggacggcctccttggcaaggagctgggattcgatgcctccgaggtggagttgacgagaaacaatgaattgattgcagttggaaaaggcagctcactgaagcggctccctgtttttggaatggagcctcgcatcctatacaaccctttacaaggccagaaatgtattgttcaaacaacttcatggtcccagtgctcaaagacctgtggaactggtatctccacacgagttaccaatgacaaccctgagtgccgccttgtgaaagaaacccggatttgtgaggtgcggccttgtggacagccagtgtacagcagcctgaaaaagggcaagaaatgcagcaagaccaagaaatcccccgaaccagtcaggtttacttacgctggatgtttgagtgtgaagaaataccggcccaagtactgcggttcctgcgtggacggccgatgctgcacgccccagctgaccaggactgtgaagatgcggttccgctgcgaagatggggagacattttccaagaacgtcatgatgatccagtcctgcaaatgcaactacaactgcccgcacgccaatgaagcagcgtttcccttctacaggctgttcaatgacattcacaaatttagg

SEQ ID NO: 164 - protein, 356 aa, Artificial Sequence
  Description of Artifical Sequence:  Domain
TCPAACHCPLEAPKCAPGVGLVRDGCGCCKVCAKQLNEDCSKTQPCDHTKGLECNFGASSTALKGICRAQSEGRPCEYNSRIYQNGESFQPNCKHQCTCIDGAVGCIPLCPQELSLPNLGCPNPRLVKVTGQCCEEWVCDEDSIKDPMEDQDGLLGKELGFDASEVELTRNNELIAVGKGSSLKRLPVFGMEPRILYNPLQGQKCIVQTTSWSQCSKTCGTGISTRVTNDNPECRLVKETRICEVRPCGQPVYSSLKKGKKCSKTKKSPEPVRFTYAGCLSVKKYRPKYCGSCVDGRCCTPQLTRTVKMRFRCEDGETFSKNVMMIQSCKCNYNCPHANEAAFPFYRLFNDIHKFR

SEQ ID NO: 165 - DNA, 1198 bp, Artificial Sequence
  Description of Artifical Sequence:  Primer/Probe
gtacaaaaaagcaggctccgcggccgcccccttcaccaccatgagctcccgcatcgccagggcgctcgccttagtcgtcacccttctccacttgaccaggctggcgctctccacctgccccgctgcctgccactgccccctggaggcgcccaagtgcgcgccgggagtcgggctggtccgggacggctgcggctgctgtaaggtctgcgccaagcagctcaacgaggactgcagcaaaacgcagccctgcgaccacaccaaggggctggaatgcaacttcggcgccagctccaccgctctgaaggggatctgcagagctcagtcagagggcagaccctgtgaatataactccagaatctaccaaaacggggaaagtttccagcccaactgtaaacatcagtgcacatgtattgatggcgccgtgggctgcattcctctgtgtccccaagaactatctctccccaacttgggctgtcccaaccctcggctggtcaaagttaccgggcagtgctgcgaggagtgggtctgtgacgaggatagtatcaaggaccccatggaggaccaggacggcctccttggcaaggagctgggattcgatgcctccgaggtggagttgacgagaaacaatgaattgattgcagttggaaaaggcagctcactgaagcggctccctgtttttggaatggagcctcgcatcctatacaaccctttacaaggccagaaatgtattgttcaaacaacttcatggtcccagtgctcaaagacctgtggaactggtatctccacacgagttaccaatgacaaccctgagtgccgccttgtgaaagaaacccggatttgtgaggtgcggccttgtggacagccagtgtacagcagcctgaaaaagggcaagaaatgcagcaagaccaagaaatcccccgaaccagtcaggtttacttacgctggatgtttgagtgtgaagaaataccggcccaagtactgcggttcctgcgtggacggccgatgctgcacgccccagctgaccaggactgtgaagatgcggttccgctgcgaagatggggagacattttccaagaacgtcatgatgatccagtcctgcaaatgcaactacaactgcccgcatgccaatgaagcagcgtttcccttctacaggctgttcaatgacattcacaaatttagggacaagggtgggcgcgcc

SEQ ID NO: 166 - protein, 399 aa, Artificial Sequence
  Description of Artifical Sequence:  Domain
YKKAGSAAAPFTTMSSRIARALALVVTLLHLTRLALSTCPAACHCPLEAPKCAPGVGLVRDGCGCCKVCAKQLNEDCSKTQPCDHTKGLECNFGASSTALKGICRAQSEGRPCEYNSRIYQNGESFQPNCKHQCTCIDGAVGCIPLCPQELSLPNLGCPNPRLVKVTGQCCEEWVCDEDSIKDPMEDQDGLLGKELGFDASEVELTRNNELIAVGKGSSLKRLPVFGMEPRILYNPLQGQKCIVQTTSWSQCSKTCGTGISTRVTNDNPECRLVKETRICEVRPCGQPVYSSLKKGKKCSKTKKSPEPVRFTYAGCLSVKKYRPKYCGSCVDGRCCTPQLTRTVKMRFRCEDGETFSKNVMMIQSCKCNYNCPHANEAAFPFYRLFNDIHKFRDKGGRA

SEQ ID NO: 167 - DNA, 1111 bp, Artificial Sequence; identical to SEQ ID NO: 161
  Description of Artifical Sequence:  Primer/Probe

SEQ ID NO: 168 - protein, 370 aa, Artificial Sequence; identical to SEQ ID NO: 162
  Description of Artifical Sequence:  Domain

SEQ ID NO: 169 - DNA, 1174 bp, Artificial Sequence
  Description of Artifical Sequence:  Primer/Probe
gaattcgcccttcaccagatctatgagctcccgcatcgccagggcgctcgccttagtcgtcacccttctccacttgaccaggctggcgctctccacctgccccgctgcctgccactgccccctggaggcgcccaagtgcgcgccgggagtcgggctggtccgggacggctgcggctgctgtaaggtctgcgccaagcagctcaacgaggactgcagcaaaacgcagccctgcgaccacaccaaggggctggaatgcaacttcggcgccagctccaccgctctgaaggggatctgcagagctcagtcagagggcagaccctgtgaatataactccagaatctaccaaaacggggaaagtttccagcccaactgtaaacatcagtgcacatgtattgatggcgccgtgggctgcattcctctgtgtccccaagaactatctctccccaacttgggctgtcccaaccctcggctggtcaaagttaccgggcagtgctgcgaggagtgggtctgtgacgaggatagtatcaaggaccccatggaggaccaggacggcctccttggcaaggagctgggattcgatgcctccgaggtggagttgacgagaaacaatgaattgattgcagttggaaaaggcagctcactgaagcggctccctgtttttggaatggagcctcgcatcctatacaaccctttacaaggccagaaatgtattgttcaaacaacttcatggtcccagtgctcaaagacctgtggaactggtatctccacacgagttaccaatgacaaccctgagtgccgccttgtgaaagaaacccggatttgtgaggtgcggccttgtggacagccagtgtacagcagcctgaaaaagggcaagaaatgcagcaagaccaagaaatcccccgaaccagtcaggtttacttacgctggatgtttgagtgtgaagaaataccggcccaagtactgcggttcctgcgtggacggccgatgctgcacgccccagctgaccaggactgtgaagatgcggttccgctgcgaagatggggagacattttccaagaacgtcatgatgatccagtcctgcaaatgcaactacaactgcccgcatgccaatgaagcagcgtttcccttctacaggctgttcaatgacattcacaaatttagggacctcgagggc

SEQ ID NO: 170 - protein, 381 aa, Artificial Sequence [sequence omitted]

SEQ ID NO: 171 - DNA, 1168 bp, Artificial Sequence
  Description of Artifical Sequence:  Primer/Probe
caccggatccaccatgagctcccgcatcgccagggcgctcgccttagtcgtcacccttctccacttgaccaggctggcgctctccacctgccccgctgcctgccactgccccctggaggcgcccaagtgcgcgccgggagtcgggctggtccgggacggctgcggctgctgtaaggtctgcgccaagcagctcaacgaggactgcagcaaaacgcagccctgcgaccacaccaaggggctggaatgcaacttcggcgccagctccaccgctctgaaggggatctgcagagctcagtcagagggcagaccctgtgaatataactccagaatctaccaaaacggggaaagtttccagcccaactgtaaacatcagtgcacatgtattgatggcgccgtgggctgcattcctctgtgtccccaagaactatctctccccaacttgggctgtcccaaccctcggctggtcaaagttaccgggcagtgctgcgaggagtgggtctgtgacgaggatagtatcaaggaccccatggaggaccaggacggcctccttggcaaggagctgggattcgatgcctccgaggtggagttgacgagaaacaatgaattgattgcagttggaaaaggcagctcactgaagcggctccctgtttttggaatggagcctcgcatcctatacaaccctttacaaggccagaaatgtattgttcaaacaacttcatggtcccagtgctcaaagacctgtggaactggtatctccacacgagttaccaatgacaaccctgagtgccgccttgtgaaagaaacccggatttgtgaggtgcggccttgtggacagccagtgtacagcagcctgaaaaagggcaagaaatgcagcaagaccaagaaatcccccgaaccagtcaggtttacttacgctggatgtttgagtgtgaagaaataccggcccaagtactgcggttcctgcgtggacggccgatgctgcacgccccagctgaccaggactgtgaagatgcggttccgctgcgaagatggggagacattttccaagaacgtcatgatgatccagtcctgcaaatgcaactacaactgcccgcatgccaatgaagcagcgtttcccttctacaggctgttcaatgacattcacaaatttagggactaggtcgacggc

SEQ ID NO: 172 - protein, 381 aa, Artificial Sequence [sequence omitted]

SEQ ID NO: 173 - DNA, 1887 bp, Artificial Sequence
  Description of Artifical Sequence:  Primer/Probe
gcgcacggcctgtccgctgcacaccagcttgttggcgtcttcgtcgccgcgctcgccccgggctactcctgcgcgccacaatgagctcccgcatcgccagggcgctcgccttagtcgtcacccttctccacttgaccaggctggcgctctccacctgccccgctgcctgccactgccccctggaggcgcccaagtgcgcgccgggagtcgggctggtccgggacggctgcggctgctgtaaggtctgcgccaagcagctcaacgaggactgcagcaaaacgcagccctgcgaccacaccaaggggctggaatgcaacttcggcgccagctccaccgctctgaaggggatctgcagagctcagtcagagggcagaccctgtgaatataactccagaatctaccaaaacggggaaagtttccagcccaactgtaaacatcagtgcacatgtattgatggcgccgtgggctgcattcctctgtgtccccaagaactatctctccccaacttgggctgtcccaaccctcggctggtcaaagttaccgggcagtgctgcgaggagtgggtctgtggcgaggatagtatcaaggaccccatggaggaccaggacggcctccttggtaaggagctgggattcgatgcctccgaggtggagttgacgagaaacaatgaattgattgcagttggaaaaggcagctcactgaagcggatccctgtttttggaatggagcctcgcatccgatacaaccctttacaaggccagaaatgtattgttcaaacaacttcatggtcccagtgctcaaagacctgtggaactggtatctccacacgagttaccaatgacaaccctgagtgccgccttgtgaaagaaacccggatttgtgaggtgcggccttgtggacagccagtgtacagcagcctgaaaaagggcaagaaatgcagcaagaccaagaaatcccccgaaccagtcaggtttacttacgctggatgtttgagtgtgaagaaataccggcccaagtactgcggttcctgcgtggacggccgatgctgcacgccccagctgaccaggactgtgaagatgcggttccgctgcgaagatggggagacattttccaagaacgtcatgatgatccagtcctgcaaatgcaactacaactgcccgcatgccaatgaagcagcgtttcccttctacaggctgttcaatgacattcacaaatttagggactaaatgctacctgggtttccagggcacacctagacaaacaagggagaagagtgtcagaatcagaatcatggagaaaatgggcgggggtggtgtgggtgatgggactcattgtagaaaggaagccttgctcattcttgaggagcattaaggtatttcgaaactgccaagggtgctggtgcggatggacactaatgcagccacgattggagaatactttgcttcatagtattggagcacatgttactgcttcattttggagcttgtggagttgatgactttctgttttctgtttgtaaattatttgctaagcatattttctctaggcttttttccttttggggttctacagtcgtaaaagagataataagattagttggacagtttaaagcttttattcgtcctttgacaaaagtaaatgggagggcattccatcccttcctgaagggggacactccatgagtgtctgtgagaggcagctatctgcactctaaactgcaaacagaaatcaggtgttttaagactgaatgttttatttatcaaaatgtagcttttggggagggaggggaaatgtaatactggaataatttgtaaatgattttaattttatattcagtgaaaagattttatttatggaattaaccatttaataaagaaatatttacct

SEQ ID NO: 174 - protein, 381 aa, Artificial Sequence
  Description of Artifical Sequence:  Domain
MSSRIARALALVVTLLHLTRLALSTCPAACHCPLEAPKCAPGVGLVRDGCGCCKVCAKQLNEDCSKTQPCDHTKGLECNFGASSTALKGICRAQSEGRPCEYNSRIYQNGESFQPNCKHQCTCIDGAVGCIPLCPQELSLPNLGCPNPRLVKVTGQCCEEWVCGEDSIKDPMEDQDGLLGKELGFDASEVELTRNNELIAVGKGSSLKRIPVFGMEPRIRYNPLQGQKCIVQTTSWSQCSKTCGTGISTRVTNDNPECRLVKETRICEVRPCGQPVYSSLKKGKKCSKTKKSPEPVRFTYAGCLSVKKYRPKYCGSCVDGRCCTPQLTRTVKMRFRCEDGETFSKNVMMIQSCKCNYNCPHANEAAFPFYRLFNDIHKFRD

SEQ ID NO: 175 - DNA, 1214 bp, Artificial Sequence
  Description of Artifical Sequence:  Primer/Probe
ctcctttcttccctctccagaagtccattggaatattaagcccaggagttgctttggggatggctggaagtgcaatgtcttccaagttcttcctagtggctttggccatatttttctccttcgcccaggttgtaattgaagccaattcttggtggtcgctaggtatgaataaccctgttcagatgtcagaagtatatattataggagcacagcctctctgcagccaactggcaggactttctcaaggacagaagaaactgtgccacttgtatcaggaccacatgcagtacatcggagaaggcgcgaagacaggcatcaaagaatgccagtatcaattccgacatcgaaggtggaactgcagcactgtggataacacctctgtttttggcagggtgatgcagataggcagccgcgagacggccttcacatacgcggtgagcgcagcaggggtggtgaacgccatgagccgggcgtgccgcgagggcgagctgtccacctgcggctgcagccgcgccgcgcgccccaaggacctgccgcgggactggctctggggcggctgcggcgacaacatcgactatggctaccgctttgccaaggagttcgtggacgcccgcgagcgggagcgcatccacgccaagggctcctacgagagtgctcgcatcctcatgaacctgcacaacaacgaggccggccgcaggacggtgtacaacctggctgatgtggcctgcaagtgccatggggtgtccggctcatgtagcctgaagacatgctggctgcagctggcagacttccgcaaggtgggtgatgccctgaaggagaagtacgacagcgcggcggccatgcggctcaacagccggggcaagttggtacaggtcaacagccgcttcaactcgcccaccacacaagacctggtctacatcgaccccagccctgactactgcgtgcgcaatgagagcaccggctcgctgggcacgcagggccgcctgtgcaacaagacgtcggagggcatggatggctgcgagctcatgtgctgcggccgtggctacgaccagttcaagaccgtgcagacggagcgctgccactgcaagttccactggtgctgctacgtcaagtgcaagaagtgcacggagatcgtggaccagtttgtgtgcaagtagtgggtgccacccagcactcagccccgcccccaggacccgcttatttatagaaagtac

SEQ ID NO: 176 - protein, 365 aa, Artificial Sequence
  Description of Artifical Sequence:  Domain
MAGSAMSSKFFLVALAIFFSFAQVVIEANSWWSLGMNNPVQMSEVYIIGAQPLCSQLAGLSQGQKKLCHLYQDHMQYIGEGAKTGIKECQYQFRHRRWNCSTVDNTSVFGRVMQIGSRETAFTYAVSAAGVVNAMSRACREGELSTCGCSRAARPKDLPRDWLWGGCGDNIDYGYRFAKEFVDARERERIHAKGSYESARILMNLHNNEAGRRTVYNLADVACKCHGVSGSCSLKTCWLQLADFRKVGDALKEKYDSAAAMRLNSRGKLVQVNSRFNSPTTQDLVYIDPSPDYCVRNESTGSLGTQGRLCNKTSEGMDGCELMCCGRGYDQFKTVQTERCHCKFHWCCYVKCKKCTEIVDQFVCK

SEQ ID NO: 177 - DNA, 1026 bp, Artificial Sequence
  Description of Artifical Sequence:  Primer/Probe
ggatccgccaattcttggtggtcgctaggtatgaataaccctgttcagatgtcagaagtatatattataggagcacagcctctctgcagccaactggcaggactttctcaaggacagaagaaactgtgccacttgtatcaggaccacatgcagtacatcggagaaggcgcgaagacaggcatcaaagaatgccagtatcaattccgacatcgaaggtggaactgcagcactgtggataacacctctgtttttggcagggtgatgcagataggcagccgcgagacggccttcacatacgcggtgagcgcagcaggggtggtgaacgccatgagccgggcgtgccgcgagggcgagctgtccacctgcggctgcagccgcgccgcgcgccccaaggacctgccgcgggactggctctggggcggctgcggcgacaacatcgactatggctaccgctttgccaaggagttcgtggacgcccgcgagcgggagcgcatccacgccaagggctcctacgagagtgctcgcatcctcatgaacctgcacaacaacgaggccggccgcaggacggtgtacaacctggctgatgtggcctgcaagtgccatggggtgtccggctcatgtagcctgaagacatgctggctgcagctggcagacttccgcaaggtgggtgatgccctgaaggagaagtacgacagcgcggcggccatgcggctcaacagccggggcaagttggtacaggtcaacagccgcttcaactcgcccaccacacaagacctggtctacatcgaccccagccctgactactgcgtgcgcaatgagagcaccggctcgctgggcacgcagggccgcctgtgcaacaagacgtcggagggcatggatggctgcgagctcatgtgctgcggccgtggctacgaccagttcaagaccgtgcagacggagcgctgccactgcaagttccactggtgctgctacgtcaagtgcaagaagtgcacggagatcgtggaccagtttgtgtgcaagctcgag

SEQ ID NO: 178 - protein, 338 aa, Artificial Sequence
  Description of Artifical Sequence:  Domain
ANSWWSLGMNNPVQMSEVYIIGAQPLCSQLAGLSQGQKKLCHLYQDHMQYIGEGAKTGIKECQYQFRHRRWNCSTVDNTSVFGRVMQIGSRETAFTYAVSAAGVVNAMSRACREGELSTCGCSRAARPKDLPRDWLWGGCGDNIDYGYRFAKEFVDARERERIHAKGSYESARILMNLHNNEAGRRTVYNLADVACKCHGVSGSCSLKTCWLQLADFRKVGDALKEKYDSAAAMRLNSRGKLVQVNSRFNSPTTQDLVYIDPSPDYCVRNESTGSLGTQGRLCNKTSEGMDGCELMCCGRGYDQFKTVQTERCHCKFHWCCYVKCKKCTEIVDQFVCK

SEQ ID NO: 179 - DNA, 1215 bp, Artificial Sequence
  Description of Artifical Sequence:  Primer/Probe
gctcctttcttccctctccagaagtccattggaatattaagcccaggagttgctttggggatggctggaagtgcaatgtcttccaagttcttcctagtggctttggccatatttttctccttcgcccaggttgtaattgaagccaattcttggtggtcgctaggtatgaataaccctgttcagatgtcagaagtatatattataggagcacagcctctctgcagccaactggcaggactttctcaaggacagaagaaactgtgccacttgtatcaggaccacatgcagtacatcggagaaggcgcgaagacaggcatcaaagaatgccagtatcaattccgacatcgaaggtggaactgcagcactgtggataacacctctgtttttggcagggtgatgcagataggtagccgcgagacggccttcacatacgcggtgagcgcagcaggggtggtgaacgccatgagccgggcgtgccgcgagggcgagctgtccacctgcggctgcagccgcgccgcgcgccccaaggacctgccgcgggactggctctggggcggctccggcgccaccaacaaaaaaggctaccgctccgccaaggagatcgtgcacgcccgcgaacgaggacgcatccacgccaagggctcctacgagagtgctcgcatcctcatgaacctgcacaacaacgaggccggccgcaggacggtgtacaacctggctgatgtggcctgcaagtgccatggggtgtccggctcatgtagcctgaagacatgctggctgcagctggcagacttccgcaaggtgggtgatgccctgaaggagaagtacgacagcgcggcggccatgcggctcaacagccggggcaagttggtacaggtcaacagccgcttcaactcgcccaccacacaagacctggtctacatcgaccccagccctgactactgcgtgcgcaatgagagcaccggctcgctgggcacgcagggccgcctgtgcaacaagacgtcggagggcatggatggctgcgagctcatgtgctgcggccgtggctacgaccagttcaagaccgtgcagacggagcgctgccactgcaagttccactggtgctgctacgtcaagtgcaagaagtgcacggagatcgtggaccagtttgtgtgcaagtagtgggtgccacccagcactcagccccgctcccaggacccgcttatttatagaaagtac

SEQ ID NO: 180 - protein, 380 aa, Artificial Sequence
  Description of Artifical Sequence:  Domain
LQKSIGILSPGVALGMAGSAMSSKFFLVALAIFFSFAQVVIEANSWWSLGMNNPVQMSEVYIIGAQPLCSQLAGLSQGQKKLCHLYQDHMQYIGEGAKTGIKECQYQFRHRRWNCSTVDNTSVFGRVMQIGSRETAFTYAVSAAGVVNAMSRACREGELSTCGCSRAARPKDLPRDWLWGGSGATNKKGYRSAKEIVHARERGRIHAKGSYESARILMNLHNNEAGRRTVYNLADVACKCHGVSGSCSLKTCWLQLADFRKVGDALKEKYDSAAAMRLNSRGKLVQVNSRFNSPTTQDLVYIDPSPDYCVRNESTGSLGTQGRLCNKTSEGMDGCELMCCGRGYDQFKTVQTERCHCKFHWCCYVKCKKCTEIVDQFVCK

SEQ ID NO: 181 - DNA, 1215 bp, Artificial Sequence
  Description of Artifical Sequence:  Primer/Probe
ccaaaccactggaggtcctgatcgatctgcccaccggagcctccgggcttcgacatgctggaggagccccggccgcggcctccgccctcgggcctcgcgggtctcctgttcctggcgttgtgcagtcgggctctaagcaatgagattctgggcctgaagttgcctggcgagccgccgctgacggccaacaccgtgtgcttggcgctgtccggcctgagcaagcggcagctaggcctgtgcctgcgcaaccccgacgtgacggcgtccgcgcttcagggtctgcacatcgcggtccacgagtgtcagcaccagctgcgcgaccagcgctggaactgctccgcgcttgagggcggcggccgcctgccgcaccacagcgccatcctcaagcgggcctggtgtaggggaaggcttggacacccaaatggtttccgagaaagtgctttttccttctccatgctggctgctggggtcatgcacgcagtagccacggcctgcagcctgggcaagctggtgagctgtggctgtggctggaagggcagtggtgagcaggatcggctgagggccaaactgctgcagctgcaggcactgtcccgaggcaagagtttcccccactctctgcccagccctggccctggctcaagccccagccctggcccccaggacacatgggaatggggtggctgtaaccatgacatggactttggagagaagttctctcgggatttcttggattccagggaagctccccgggacatccaggcacgaatgcgaatccacaacaacagggtggggcgccaggtggtaactgaaaacctgaagcggaaatgcaagtgtcatggcacatctggcagctgccagttcaagacaaattctggagccttccagccccgtctgcgtccccgtcgcctctcaggagagctggtctactttgagaagtctcctgacttctgtgagcgagaccccactatgggctccccagggacaaggggccgggcctgcaacaagaccagccgcctgttggatggctgtggcagcctgtgctgtggccgtgggcacaacgtgctccggcagacacgagttgagcgctgccattgccgcttccactggtgctgctatgtgctgtgtgatgagtgcaaggttacagagtgggtgaatgtgtgtaagtgagggtcagccttaccttggggctggggaagaggactgtgtgagaggggt

SEQ ID NO: 182 - protein, 370 aa, Artificial Sequence
  Description of Artifical Sequence:  Domain
MLEEPRPRPPPSGLAGLLFLALCSRALSNEILGLKLPGEPPLTANTVCLALSGLSKRQLGLCLRNPDVTASALQGLHIAVHECQHQLRDQRWNCSALEGGGRLPHHSAILKRAWCRGRLGHPNGFRESAFSFSMLAAGVMHAVATACSLGKLVSCGCGWKGSGEQDRLRAKLLQLQALSRGKSFPHSLPSPGPGSSPSPGPQDTWEWGGCNHDMDFGEKFSRDFLDSREAPRDIQARMRIHNNRVGRQVVTENLKRKCKCHGTSGSCQFKTNSGAFQPRLRPRRLSGELVYFEKSPDFCERDPTMGSPGTRGRACNKTSRLLDGCGSLCCGRGHNVLRQTRVERCHCRFHWCCYVLCDECKVTEWVNVCK

SEQ ID NO: 183 - DNA, 1091 bp, Artificial Sequence
  Description of Artifical Sequence:  Primer/Probe
ccaacaccgtgtgcttgacgctgtccggcctgagcaagcggcagctaggcctgtgcctgcgcaaccccgacgtgacggcgtccgcgcttcagggtctgcacatcgcggtccacgagtgtcagcaccagctgcgcgaccagcgctggaactgctccgcgcttgagggcggcggccgcctgccgcaccacagcgccatcctcaagcgcggtttccgagaaagtgctttttccttctccatgctggctgctggggtcatgcacgcagtagccacggcctgcggcctgggcaagctggtgagctgtggctgtggctggaagggcagtggtgagcaggatcggctgagggccaaactgctgcagctgcaggcactgtcccgaggcaagagtttcccccactctctgcccagccctggccctggctcaagccccagccctggcccccaggacacatgggaatggggtggctgtaaccatgacatggactttggagagaagttctctcgggatttcttggattccagggaagctccccgggacatccaggcacgaatgcgaatccacaacaacagggtggggcgccaggtggtaactgaaaacctgaagcggaaatgcaagtgtcatggcacatcaggcagctgccagttcaagacatgctggagggcggccccagagttccgggcagtgggggcggcgttgagggagcggctgggccgggccatcttcattgatacccacaaccgcaattctggagccttccagccccgtctgcgtccccgtcgcctctcaggagagctggtctactttgagaagtctcctgacttctgtgagcgagaccccactatgggctccccagggacaaggggccgggcctgcaacaagaccagccgcctgttggatggctgtggcagcctgtgctgtggccgtgggcataacgtgctccggcagacacgagttgagcgctgccattgccgcttccactggtgctgctatgtgctgtgtgatgagtgcaaggttacagagtgggtgaatgtgtgtaagtgagggtcagccttagccttgggggctggggaagaggactgtgtgagaggggcg

SEQ ID NO: 184 - protein, 345 aa, Artificial Sequence
  Description of Artifical Sequence:  Domain
NTVCLTLSGLSKRQLGLCLRNPDVTASALQGLHIAVHECQHQLRDQRWNCSALEGGGRLPHHSAILKRGFRESAFSFSMLAAGVMHAVATACGLGKLVSCGCGWKGSGEQDRLRAKLLQLQALSRGKSFPHSLPSPGPGSSPSPGPQDTWEWGGCNHDMDFGEKFSRDFLDSREAPRDIQARMRIHNNRVGRQVVTENLKRKCKCHGTSGSCQFKTCWRAAPEFRAVGAALRERLGRAIFIDTHNRNSGAFQPRLRPRRLSGELVYFEKSPDFCERDPTMGSPGTRGRACNKTSRLLDGCGSLCCGRGHNVLRQTRVERCHCRFHWCCYVLCDECKVTEWVNVCK

SEQ ID NO: 185 - DNA, 1317 bp, Artificial Sequence
  Description of Artifical Sequence:  Primer/Probe
ccaaaccactggaggtcctgatcgatctgcccaccggagcctccgggcttcgacatgctggaggagccccggccgcggcctccgccctcgggcctcgcgggtctcctgttcctggcgttgtgcagtcgggctctaagcaatgagattctgggcctgaagttgcctggcgagccgccgctgacggccaacaccgtgtgcttgacgctgtccggcctgagcaagcggcagctaggcctgtgcctgcgcaaccccgacgtgacggcgtccgcgcttcagggtctgcacatcgcggtccacgagtgtcagcaccagctgcgcgaccagcgctggaactgctccgcgcttgagggcggcggccgcctgccgcaccacagcgccatcctcaagcgcggtttccgagaaagtgctttttccttctccatgctggctgctggggtcatgcacgcagtagccacggcctgcagcctgggcaagctggtgagctgtggctgtggctggaagggcagtggtgagcaggatcggctgagggccaaactgctgcagctgcaggcactgtcccgaggcaagagtttcccccactctctgcccagccctggccctggctcaagccccagccctggcccccaggacacatgggaatggggtggctgtaaccatgacatggactttggagagaagttctctcgggatttcttggattccagggaagctccccgggacatccaggcacgaatgcgaatccacaacaacagggtggggcgccaggtggtaactgaaaacctgaagcggaaatgcaagtgtcatggcacatcaggcagctgccagttcaagacatgctggagggcggccccagagttccgggcagtgggggcggcgttgagggagcggctgggccgggccatcttcattgatacccacaaccgcaattctggagccttccagccccgtctgcgtccccgtcgcctctcaggagagctggtctactttgagaagtctcctgacttctgtgagcgagaccccactatgggctccccagggacaaggggccgggcctgcaacaagaccagccgcctgttggatggctgtggcagcctgtgctgtggccgtgggcacaacgtgctccggcagacacgagttgagcgctgccattgccgcttccactggtgctgctatgtgctgtgtgatgagtgcaaggttacagagtgggtgaatgtgtgtaagtgagggtcagccttaccttgggggctggggaagaggactgtgtgagaggggcgccttttcagccctttgctctgatttccttccaaggtcactctt

SEQ ID NO: 186 - protein, 389 aa, Artificial Sequence
  Description of Artifical Sequence:  Domain
MLEEPRPRPPPSGLAGLLFLALCSRALSNEILGLKLPGEPPLTANTVCLTLSGLSKRQLGLCLRNPDVTASALQGLHIAVHECQHQLRDQRWNCSALEGGGRLPHHSAILKRGFRESAFSFSMLAAGVMHAVATACSLGKLVSCGCGWKGSGEQDRLRAKLLQLQALSRGKSFPHSLPSPGPGSSPSPGPQDTWEWGGCNHDMDFGEKFSRDFLDSREAPRDIQARMRIHNNRVGRQVVTENLKRKCKCHGTSGSCQFKTCWRAAPEFRAVGAALRERLGRAIFIDTHNRNSGAFQPRLRPRRLSGELVYFEKSPDFCERDPTMGSPGTRGRACNKTSRLLDGCGSLCCGRGHNVLRQTRVERCHCRFHWCCYVLCDECKVTEWVNVCK

SEQ ID NO: 187 - DNA, 651 bp, Artificial Sequence
  Description of Artifical Sequence:  Primer/Probe
accgccgctatggtctccgtgcctaccacctggtgctccgttgcgctagccctgctcgtggccctgcatgaagggaagggccaggctgctgccaccctggagcagccagcgtcctcatctcatgcccaaggcacccaccttcggcttcgccgttgctcctgcagctcctggctcgacaaggagtgcgtctacttctgccacttggacatcatctgggtgaacactcctgaacagacagctccttacggcctgggaaacccgccaagacgccggcgccgctccctgccaaggcgctgtcagtgctccagtgccagggaccccacctgtgccaccttctgccttcgaaggccctgggacatttccacagtcaagagcctctttgccaagcgacaacaggaggccatgcgggagcctcggtccacacattccaggtggaggaagagatagtgtcgtgagctggaggaacattgggaaggaagcccgcggggagagaggaggagagaagtggccagggcttgtggactctctgcctgcttcctggaccggggccttggtcccagacagctggacccatttgccaggattggcacaggctccctggtgagggagcctcgtccaaggcagttctgtgtcctcgcactgcccagggaa

SEQ ID NO: 188 - protein, 145 aa, Artificial Sequence
  Description of Artifical Sequence:  Domain
MVSVPTTWCSVALALLVALHEGKGQAAATLEQPASSSHAQGTHLRLRRCSCSSWLDKECVYFCHLDIIWVNTPEQTAPYGLGNPPRRRRRSLPRRCQCSSARDPTCATFCLRRPWDISTVKSLFAKRQQEAMREPRSTHSRWRKR

SEQ ID NO: 189 - DNA, 556 bp, Artificial Sequence
  Description of Artifical Sequence:  Primer/Probe
taccgccgctatggtttccgtgcctagcacctggtgctccgttgcgctagccctgctcgtggccctgcatgaagggaagggccaggctgctgccaccctggagcagccagcgtcctcatctcatgcccaaggcacccaccttcggcttcgccgttgctcctgcagctcctggctcgacaaggagtgcgtctacttctgccacttggacatcatctgggtgaacactcctgaacagacagctccttacggcctgggaaacccgccaagacgccggcgccgctccctgccaaggcgctgtcagtgctccagtgccagggaccccgcctgtgccaccttctgccttcgaaggccctggactgaagccggggcagtcccaagccggaagtcccctgcagacgtgttccagactggcaagacaggggccactacaggagagcttctccaaaggctgagggacatttccacagtcaagagcctctttgccaagcgacaacaggaggccatgcgggagcctcggtccacacattccaggtggaaggagagatagtgtcgtgaa

SEQ ID NO: 190 - protein, 178 aa, Artificial Sequence
  Description of Artifical Sequence:  Domain
MVSVPSTWCSVALALLVALHEGKGQAAATLEQPASSSHAQGTHLRLRRCSCSSWLDKECVYFCHLDIIWVNTPEQTAPYGLGNPPRRRRRSLPRRCQCSSARDPACATFCLRRPWTEAGAVPSRKSPADVFQTGKTGATTGELLQRLRDISTVKSLFAKRQQEAMREPRSTHSRWKER

SEQ ID NO: 191 - DNA, 668 bp, Artificial Sequence
  Description of Artifical Sequence:  Primer/Probe
ctccctgctccagtccagcctgcgcgctccaccgccgctatggtttccgtgcctagcacctggtgctccgttgcgctagccctgctcgtggccctgcatgaagggaagggccaggctgctgccaccctggagcagccagcgtcctcatctcatgcccaaggcacccaccttcggcttcgccgttgctcctgcagctcctggctcgacaaggagtgcgtctacttctgccacttggacatcatctgggtgaacactcctgaacagacagctccttacggcctgggaaacccgccaagacgccggcgccgctccctgccaaggcgctgtcagtgctccagtgccagggaccccgcctgtgccaccttctgccttcgaaggccctggactgaagccggggcagtcccaagccggaagtcccctgcagacgtgttccagactggcaagacaggggccactacaggagagcttctccaaaggctgagggacatttccacagtcaagagcctctttgccaagcgacaacaggaggccatgcgggagcctcggtccacacattccaggtggaggaagagatagtgtcgtgagctggaggaacattgggaaggaagcccgcggggagagaggaggagagaagtggccagggcttgtggactctcctgctgctttct

SEQ ID NO: 192 - protein, 178 aa, Artificial Sequence
  Description of Artifical Sequence:  Domain
MVSVPSTWCSVALALLVALHEGKGQAAATLEQPASSSHAQGTHLRLRRCSCSSWLDKECVYFCHLDIIWVNTPEQTAPYGLGNPPRRRRRSLPRRCQCSSARDPACATFCLRRPWTEAGAVPSRKSPADVFQTGKTGATTGELLQRLRDISTVKSLFAKRQQEAMREPRSTHSRWRKR

SEQ ID NO: 193 - DNA, 964 bp, Artificial Sequence
  Description of Artifical Sequence:  Primer/Probe
accgccgctatggtctccgtgcctaccacctggtgctccgttgcgctagccctgctcgtggccctgcatgaagggaagggccaggctgctgccaccctggagcagccagcgtcctcatctcatgcccaaggcacccaccttcggcttcgccgttgctcctgcagctcctggctcgacaaggagtgcgtctacttctgccacttggacatcatctgggtgaacactcctgaggacatttccacagtcaagagcctctttgccaagcgacaacaggaggccatgcgggagcctcggtccacacattccaggtggaggaagagatagtgtcgtgagctggaggaacattgggaaggaagcccgcggggagagaggaggagagaagtggccggggcttgtggactctctgcctgcttcctggaccggggccttggtcccagacagctggacccatttgccaggattggcacaagctccctggtgagggagcctcgtccaaggcagttctgtgtcctcgcactgcccagggaagccctcggcctccagactgcggagcagcctccagtgctggctgctggcccacagctctgctggaagaactgcatggggagtacattcatctggaggctgcgtcctgaggagtgtcctgtctgctgggctacaaaccaggagcgaccgtgcagccacgaacacgcatgcctcagccagccccggaggctggatggctcccctgaggctggcatcctggctggctgtgtcctctccagctttccctccccagagttcttgcaccctcattccctcgggaccctcccagtgagaagggcctgctctgcttttcctgtctgtatataacttatttgccctaagaactttgagaatcccaattatttattttaatgtattttttagaccctctatttacctgcgaacttgtgtttataataaatgaggaaacagaaaaaaa

SEQ ID NO: 194 - protein, 104 aa, Artificial Sequence
  Description of Artifical Sequence:  Domain
MVSVPTTWCSVALALLVALHEGKGQAAATLEQPASSSHAQGTHLRLRRCSCSSWLDKECVYFCHLDIIWVNTPEDISTVKSLFAKRQQEAMREPRSTHSRWRKR

SEQ ID NO: 195 - DNA, 1894 bp, Artificial Sequence
  Description of Artifical Sequence:  Primer/Probe
tggcatttctgagcaggggccaccctgacttcaccttggcccaccatgagggtcttcctgctttgtgcctacatactgctgctgatggtttcccagttgagggcagtcagctttcctgaagatgatgaaccccttaatactgtcgactatcactattcaaggcaatatccggtttttagaggacgcccttcaggcaatgaatcgcagcacaggctggactttcagctgatgttgaaaattcgagacacactttatattgctggcagggatcaagtttatacagtaaacttaaatgaaatgcccaaaacagaagtaatacccaacaagaaactgacatggcgatcaagacaacaggatcgagaaaactgtgctatgaaaggcaagcataaagatgaatgccacaactttatcaaagtatttgttccaagaaacgatgagatggtttttgtttgtggtaccaatgcattcaatcccatgtgtagatactacaggttgagtaccttagaatatgatggggaagaaattagtggcctggcaagatgcccatttgatgccagacaaaccaatgttgccctctttgctgatgggaagctgtattctgccacagtggctgacttcttggccagcgatgccgttatttatcgaagcatgggtgatggatctgcccttcgcacaataaaatatgattccaaatggataaaagagccacactttcttcatgccatagaatatggaaactatgtctatttcttctttcgagaaatcgctgtcgaacataataatttaggcaaggctgtgtattcccgcgtggcccgcatatgtaaaaacgacatgggtggttcccagcgggtcctggagaaacactggacttcatttctaaaggctcggctgaactgttctgtccctggagattcgtttttctactttgatgttctgcagtctattacagacataatacaaatcaatggcatccccactgtggtcggggtgtttaccacgcagctcaatagcatccctggttctgctgtctgtgcatttagcatggatgacattgaaaaagtattcaaaggacggtttaaggaacagaaaactccagattctgtttggacagcagttcccgaagacaaagtgccaaagccaaggcctggctgttgtgcaaaacacggccttgccgaagcttataaaacctccatcgatttcccggatgaaactctgtcattcatcaaatctcatcccctgatggactctgccgttccacccattgccgatgagccctggttcacaaagactcgggtcaggtacagactgacggccatctcagtggaccattcagccggaccctaccagaactacacagtcatctttgttggctctgaagctggcatggtacttaaagttctggcaaagaccagtcctttctctttgaacgacagcgtattactggaagagattgaagcctacaaccatgcaaagtaggtatatgttacgagaacgcccttcagcactgctcaaaaattttcggcatgtatttcatctagtcatgtccttttggtcctctaaattagcagtggtttggcataatagtgttttgtgttttttttctcattgaaataaatcttgggtttgtttttttcccgagcctgctagggcgaggggggtgaatggttgatgagtttaaaaataatgcagcccttgtttttcacctgtagaatatgagaacattttaacagcacctctcttatcttgcagatatattccaagatgctacatgcagcagacagctgtgagcttgcatacacacacacacaaatatacatgcacatacatacacagaatgtagtactagttaagtatttccttcctatctttaataagtaagagaatatttagacca

SEQ ID NO: 196 - protein, 476 aa, Artificial Sequence
  Description of Artifical Sequence:  Domain
MRVFLLCAYILLLMVSQLRAVSFPEDDEPLNTVDYHYSRQYPVFRGRPSGNESQHRLDFQLMLKIRDTLYIAGRDQVYTVNLNEMPKTEVIPNKKLTWRSRQQDRENCAMKGKHKDECHNFIKVFVPRNDEMVFVCGTNAFNPMCRYYRLSTLEYDGEEISGLARCPFDARQTNVALFADGKLYSATVADFLASDAVIYRSMGDGSALRTIKYDSKWIKEPHFLHAIEYGNYVYFFFREIAVEHNNLGKAVYSRVARICKNDMGGSQRVLEKHWTSFLKARLNCSVPGDSFFYFDVLQSITDIIQINGIPTVVGVFTTQLNSIPGSAVCAFSMDDIEKVFKGRFKEQKTPDSVWTAVPEDKVPKPRPGCCAKHGLAEAYKTSIDFPDETLSFIKSHPLMDSAVPPIADEPWFTKTRVRYRLTAISVDHSAGPYQNYTVIFVGSEAGMVLKVLAKTSPFSLNDSVLLEEIEAYNHAK

SEQ ID NO: 197 - DNA, 1383 bp, Artificial Sequence
  Description of Artifical Sequence:  Primer/Probe
ggatccgtcagctttcctgaagatgatgaaccccttaatactgtcgactatcactattcaaggcaatatccggtttttagaggacgcccttcaggcaatgaatcgcagcacaggctggactttcagctgatgttgaaaattcgagacacactttatattgctggcagggatcaagtttatacagtaaacttaaatgaaatgcccaaaacagaagtaatacccaacaagaaactgacatggcgatcaagacaacaggatcgagaaaactgtgctatgaaaggcaagcataaagatgaatgccacaactttatcaaagtatttgttccaagaaacgatgagatggtttttgtttgtggtaccaatgcattcaatcccatgtgtagatactacaggttgagtaccttagaatatgatggggaagaaattagtggcctggcaagatgcccatttgatgccagacaaaccaatgttgccctctttgctgatgggaagctgtattctgccacagtggctgacttcttggccagcgatgccgttatttatcgaagcatgggtgatggatctgcccttcgcacaataaaatatgattccaaatggataaaagagccacactttcttcatgccatagaatatggaaactatgtctatttcttctttcgagaaatcgctgtcgaacataataatttaggcaaggctgtgtattcccgcgtggcccgcatatgtaaaaacgacatgggtggttcccagcgggtcctggagaaacactggacttcatttctaaaggctcggctgaactgttctgtccctggagattcgtttttctactttgatgttctgcagtctattacagacataatacaaatcaatggcatccccactgtggtcggggtgtttaccacgcagctcaatagcatccctggttctgctgtctgtgcatttagcatggatgacattgaaaaagtattcaaaggacggtttaaggaacagaaaactccagattctgtttggacagcagttcccgaagacaaagtgccaaagccaaggcctggctgttgtgcaaaacacggccttgccgaagcttataaaacctccatcgatttcccggatgaaactctgtcattcatcaaatctcatcccctgatggactctgccgttccacccattgccgatgagccctggttcacaaagactcgggtcaggtacagactgacggccatctcagtggaccattcagccggaccctaccagaactacacagtcatctttgttggctctgaagctggcatggtacttaaagttctggcaaagaccagtcctttctctttgaacgacagcgtattactggaagagattgaagcctacaaccatgcaaagtgcctcgag

SEQ ID NO: 198 - protein, 461 aa, Artificial Sequence
  Description of Artifical Sequence:  Domain
GSVSFPEDDEPLNTVDYHYSRQYPVFRGRPSGNESQHRLDFQLMLKIRDTLYIAGRDQVYTVNLNEMPKTEVIPNKKLTWRSRQQDRENCAMKGKHKDECHNFIKVFVPRNDEMVFVCGTNAFNPMCRYYRLSTLEYDGEEISGLARCPFDARQTNVALFADGKLYSATVADFLASDAVIYRSMGDGSALRTIKYDSKWIKEPHFLHAIEYGNYVYFFFREIAVEHNNLGKAVYSRVARICKNDMGGSQRVLEKHWTSFLKARLNCSVPGDSFFYFDVLQSITDIIQINGIPTVVGVFTTQLNSIPGSAVCAFSMDDIEKVFKGRFKEQKTPDSVWTAVPEDKVPKPRPGCCAKHGLAEAYKTSIDFPDETLSFIKSHPLMDSAVPPIADEPWFTKTRVRYRLTAISVDHSAGPYQNYTVIFVGSEAGMVLKVLAKTSPFSLNDSVLLEEIEAYNHAKCLE

SEQ ID NO: 199 - DNA, 3205 bp, Artificial Sequence
  Description of Artifical Sequence:  Primer/Probe
tggcatttctgagcaggggccaccctgacttcaccttggcccaccatgagggtcttcctgctttgtgcctacatactgctgctgatggtttcccagttgagggcagtcagctttcctgaagatgatgaaccccttaatactgtcgactatcactgtaagtcgtctaggcaatatccggtttttagaggacgcccttcaggcaatgaatcgcagcacaggctggactttcagctgatgttgaaaattcgagacacactttatattgctggcagggatcaagtttatacagtaaacttaaatgaaatgcccaaaacagaagtaatatggcaacagaaactgacatggcgatcaagacaacaggatcgagaaaactgtgctatgaaaggcaagcataaagatgaatgccacaactttatcaaagtatttgttccaagaaacgatgagatggtttttgtttgtggtaccaatgcattcaatcccatgtgtagatactacagggtaagtaccttagaatatgatggggaagaaattagtggcctggcaagatgcccatttgatgccagacaaaccaatgttgccctctttgctgatgggaagctgtattctgccacagtggctgacttcttggccagcgatgccgttatttatcgaagcatgggtgatggatctgcccttcgcacaataaaatatgattccaaatggataaaagagccacactttcttcatgccatagaatatggaaactatgtctatttcttctttcgagaaatcgctgtcgaacataataatttaggcaaggctgtgtattcccgcgtggcccgcatatgtaaaaacgacatgggtggttcccagcgggtcctggagaaacactggacttcatttctaaaggctcggctgaactgttctgtccctggagattcgtttttctactttgatgttctgcagtctattacagacataatacaaatcaatggcatccccactgtggtcggggtgtttaccacgcagctcaatagcatccctggttctgctgtctgtgcatttagcatggatgacattgaaaaagtattcaaaggacggtttaaggaacagaaaactccagattctgtttggacagcagttcccgaagacaaagtgccaaagccaaggcctggctgttgtgcaaaacacggccttgccgaagcttataaaacctccatcgatttcccggatgaaactctgtcattcatcaaatctcatcccctgatggactctgccgttccacccattgccgatgagccctggttcacaaagactcgggtcaggtacagactgacggccatctcagtggaccattcagccggaccctaccagaactacacagtcatctttgttggctctgaagctggcatggtacttaaagttctggcaaagaccagtcctttctctttgaacgacagcgtattactggaagagattgaagcctacaaccatgcaaagtgcagtgctgagaatgaggaagacaaaaaggtcatctcattacagttggataaagatcaccacgctttatatgtggcgttctctagctgcattatccgcatccccctcagtcgctgtgagcgttatggatcatgtaaaaagtcttgtattgcatctcgtgacccgtattgtggctggttaagccagggatcctgtggtagagtgaccccaaaccacagtgctgaaggatatgaacaagacacagaattcggcaacacagctcatctaggggactgccatgcatatgaaccatatgaaggtcgtgttggctcactgaaagccatttgctatttattattatttttaaaaagcaccttattcacattgtcccatgtgtctatttcaggtgtacgatgggaagtccagtctggagagtccaaccagatggtccacatgaatgtcctcatcacctgtgtctttgctgcttttgttttgggggcattcattgcaggtgtggcagtatactgctatcgagacatgtttgttcggaaaaacagaaagatccataaagatgcagagtccgcccagtcatgcacagactccagtggaagttttgccaaactgaatggtctctttgacagccctgtcaaggaataccaacagaatattgattctcctaaactgtatagtaacctgctaaccagtcggaaagagctaccacccaatggagatactaaatccatggtaatggaccatcgagggcaacctccagagttggctgctcttcctactcctgagtctacacccgtgcttcaccagaagaccctgcaggccatgaagagccactcagaaaaggcccatggccatggagcttcaaggaaagaaacccctcagttttttccgtctagtccgccacctcattccccattaagtcatgggcatatccccagtgccattgttcttccaaatgctacccatgactacaacacgtctttctcaaactccaatgctcacaaagctgaaaagaagcttcaaaacattgatcaccctctcacaaagtcatccagtaagagagatcaccggcgttctgttgattccagaaataccctcaatgatctcctgaagcatctgaatgacccaaatagtaaccccaaagccatcatgggagacatccagatggcacaccagaacttaatgctggatcccatgggatcgatgtctgaggtcccacctaaagtccctaaccgggaggcatcgctatactcccctccttcaactctccccagaaatagcccaaccaagcgagtggatgtccccaccactcctggagtcccaatgacttctctggaaagacaaagaggttatcacaaaaattcctcccagaggcactctatatctgctatgcctaaaaacttaaactcaccaaatggtgttttgttatccagacagcctagtatgaaccgtggaggatatatgcccacccccactggggcgaaggtggactatattcagggaacaccagtgagtgttcatctgcagccttccctctccagacagagcagctacaccagtaatggcactcttcctaggacgggactaaagaggacgccgtccttaaaacctgacgtgccaccaaagccttcctttgttcctcaaaccccatctgtcagaccactgaacaaatacacatactaggcctcaagtgtgctattcccatgtggctttatcctgtccgtgttgttgagag

SEQ ID NO: 200 - protein, 1035 aa, Artificial Sequence
  Description of Artifical Sequence:  Domain
MRVFLLCAYILLLMVSQLRAVSFPEDDEPLNTVDYHCKSSRQYPVFRGRPSGNESQHRLDFQLMLKIRDTLYIAGRDQVYTVNLNEMPKTEVIWQQKLTWRSRQQDRENCAMKGKHKDECHNFIKVFVPRNDEMVFVCGTNAFNPMCRYYRVSTLEYDGEEISGLARCPFDARQTNVALFADGKLYSATVADFLASDAVIYRSMGDGSALRTIKYDSKWIKEPHFLHAIEYGNYVYFFFREIAVEHNNLGKAVYSRVARICKNDMGGSQRVLEKHWTSFLKARLNCSVPGDSFFYFDVLQSITDIIQINGIPTVVGVFTTQLNSIPGSAVCAFSMDDIEKVFKGRFKEQKTPDSVWTAVPEDKVPKPRPGCCAKHGLAEAYKTSIDFPDETLSFIKSHPLMDSAVPPIADEPWFTKTRVRYRLTAISVDHSAGPYQNYTVIFVGSEAGMVLKVLAKTSPFSLNDSVLLEEIEAYNHAKCSAENEEDKKVISLQLDKDHHALYVAFSSCIIRIPLSRCERYGSCKKSCIASRDPYCGWLSQGSCGRVTPNHSAEGYEQDTEFGNTAHLGDCHAYEPYEGRVGSLKAICYLLLFLKSTLFTLSHVSISGVRWEVQSGESNQMVHMNVLITCVFAAFVLGAFIAGVAVYCYRDMFVRKNRKIHKDAESAQSCTDSSGSFAKLNGLFDSPVKEYQQNIDSPKLYSNLLTSRKELPPNGDTKSMVMDHRGQPPELAALPTPESTPVLHQKTLQAMKSHSEKAHGHGASRKETPQFFPSSPPPHSPLSHGHIPSAIVLPNATHDYNTSFSNSNAHKAEKKLQNIDHPLTKSSSKRDHRRSVDSRNTLNDLLKHLNDPNSNPKAIMGDIQMAHQNLMLDPMGSMSEVPPKVPNREASLYSPPSTLPRNSPTKRVDVPTTPGVPMTSLERQRGYHKNSSQRHSISAMPKNLNSPNGVLLSRQPSMNRGGYMPTPTGAKVDYIQGTPVSVHLQPSLSRQSSYTSNGTLPRTGLKRTPSLKPDVPPKPSFVPQTPSVRPLNKYTY

SEQ ID NO: 201 - DNA, 1713 bp, Artificial Sequence
  Description of Artifical Sequence:  Primer/Probe
ggatccgtcagctttcctgaagatgatgaaccccttaatactgtcgactatcactattcaaggcaatatccggtttttagaggacgcccttcaggcaatgaatcgcagcacaggctggactttcagctgatgttgaaaattcgagacacactttatattgctggcggggatcaagtttatacagtaaacttaaatgaaatgcccaaaacagaagtaatacccaacaagaaactgacatggcgatcaagacaacaggatcgagaaaactgtgctatgaaaggcaagcataaagatgaatgccacaactttatcaaagtatttgttccaagaaacgatgagatggtttttgtttgtggtaccaatgcattcaatcccatgtgtagatactacaggttgagtaccttagaatatgatggggaagaaattagtggcctggcaagatgcccatttgatgccagacaaaccaatgttgccctctttgctgatgggaagctgtattctgccacagtggctgacttcttggccagcgatgccgttatttatcgaagcatgggtgatggatctgcccttcgcacaataaaatatgattccaaatggataaaagagccacactttcttcatgccatagaatatggaaactatgtctatttcttctttcgagaaatcgctgtcgaacataataatttaggcaaggctgtgtattcccgcgtggcccgcatatgtaaaaacgacatgggtggttcccagcgggtcctggagaaacactggacttcatttctaaaggctcggctgaactgttctgtccctggagattcgtttttctactttgatgttctgcagtctattacagacataatacaaatcaatggcatccccactgtggtcggggtgtttaccacgcagctcaatagcatccctggttctgctgtctgtgcatttagcatggatgacattgaaaaagtattcaaaggacggtttaaggaacagaaaactccagattctgtttggacagcagttcccgaagacaaagtgccaaagccaaggcctggctgttgtgcaaaacacggccttgccgaagcttataaaacctccatcgatttcccggatgaaactctgtcgttcatcaaatctcatcccctgatggactctgccgttccacccattgccgatgagccctggttcacaaagactcgggtcaggtacagactgacggccatctcagtggaccattcagccggaccctaccagaactacacagtcatctttgttggctctgaagctggcatggtacttaaagttctggcaaagaccagtcctttctctttgaacgacagcgtattactggaagagattgaagcctacaaccatgcaaagtgcaatgctgagaatgaggaagacaaaaaggtcatctcattacagttggataaagatcaccacgctttatatgtggcgttctctagctgcattatccgcatccccctcagtcgctgtgagcgttatggatcatgtaaaaagtcttgtattgcatctcgtgacccgtattgtggctggttaagccagggatcctgtggtagagtgaccccagggatgcttgctgaaggatatgaacaagacacagaattcggcaacacagctcatctaggggactgccatggtgtacgatgggaagtccagtctggagagtccaaccagatggtccacatgaatctcgag

SEQ ID NO: 202 - protein, 571 aa, Artificial Sequence
  Description of Artifical Sequence:  Domain
GSVSFPEDDEPLNTVDYHYSRQYPVFRGRPSGNESQHRLDFQLMLKIRDTLYIAGGDQVYTVNLNEMPKTEVIPNKKLTWRSRQQDRENCAMKGKHKDECHNFIKVFVPRNDEMVFVCGTNAFNPMCRYYRLSTLEYDGEEISGLARCPFDARQTNVALFADGKLYSATVADFLASDAVIYRSMGDGSALRTIKYDSKWIKEPHFLHAIEYGNYVYFFFREIAVEHNNLGKAVYSRVARICKNDMGGSQRVLEKHWTSFLKARLNCSVPGDSFFYFDVLQSITDIIQINGIPTVVGVFTTQLNSIPGSAVCAFSMDDIEKVFKGRFKEQKTPDSVWTAVPEDKVPKPRPGCCAKHGLAEAYKTSIDFPDETLSFIKSHPLMDSAVPPIADEPWFTKTRVRYRLTAISVDHSAGPYQNYTVIFVGSEAGMVLKVLAKTSPFSLNDSVLLEEIEAYNHAKCNAENEEDKKVISLQLDKDHHALYVAFSSCIIRIPLSRCERYGSCKKSCIASRDPYCGWLSQGSCGRVTPGMLAEGYEQDTEFGNTAHLGDCHGVRWEVQSGESNQMVHMNLE

SEQ ID NO: 203 - DNA, 1383 bp, Artificial Sequence; identical to SEQ ID NO: 197
  Description of Artifical Sequence:  Primer/Probe

SEQ ID NO: 204 - protein, 456 aa, Artificial Sequence
  Description of Artifical Sequence:  Domain
VSFPEDDEPLNTVDYHYSRQYPVFRGRPSGNESQHRLDFQLMLKIRDTLYIAGRDQVYTVNLNEMPKTEVIPNKKLTWRSRQQDRENCAMKGKHKDECHNFIKVFVPRNDEMVFVCGTNAFNPMCRYYRLSTLEYDGEEISGLARCPFDARQTNVALFADGKLYSATVADFLASDAVIYRSMGDGSALRTIKYDSKWIKEPHFLHAIEYGNYVYFFFREIAVEHNNLGKAVYSRVARICKNDMGGSQRVLEKHWTSFLKARLNCSVPGDSFFYFDVLQSITDIIQINGIPTVVGVFTTQLNSIPGSAVCAFSMDDIEKVFKGRFKEQKTPDSVWTAVPEDKVPKPRPGCCAKHGLAEAYKTSIDFPDETLSFIKSHPLMDSAVPPIADEPWFTKTRVRYRLTAISVDHSAGPYQNYTVIFVGSEAGMVLKVLAKTSPFSLNDSVLLEEIEAYNHAK

SEQ ID NO: 205 - DNA, 1713 bp, Artificial Sequence; identical to SEQ ID NO: 201
  Description of Artifical Sequence:  Primer/Probe

SEQ ID NO: 206 - protein, 567 aa, Artificial Sequence
  Description of Artifical Sequence:  Domain
VSFPEDDEPLNTVDYHYSRQYPVFRGRPSGNESQHRLDFQLMLKIRDTLYIAGGDQVYTVNLNEMPKTEVIPNKKLTWRSRQQDRENCAMKGKHKDECHNFIKVFVPRNDEMVFVCGTNAFNPMCRYYRLSTLEYDGEEISGLARCPFDARQTNVALFADGKLYSATVADFLASDAVIYRSMGDGSALRTIKYDSKWIKEPHFLHAIEYGNYVYFFFREIAVEHNNLGKAVYSRVARICKNDMGGSQRVLEKHWTSFLKARLNCSVPGDSFFYFDVLQSITDIIQINGIPTVVGVFTTQLNSIPGSAVCAFSMDDIEKVFKGRFKEQKTPDSVWTAVPEDKVPKPRPGCCAKHGLAEAYKTSIDFPDETLSFIKSHPLMDSAVPPIADEPWFTKTRVRYRLTAISVDHSAGPYQNYTVIFVGSEAGMVLKVLAKTSPFSLNDSVLLEEIEAYNHAKCNAENEEDKKVISLQLDKDHHALYVAFSSCIIRIPLSRCERYGSCKKSCIASRDPYCGWLSQGSCGRVTPGMLAEGYEQDTEFGNTAHLGDCHGVRWEVQSGESNQMVHMN

SEQ ID NO: 207 - DNA, 2191 bp, Artificial Sequence
  Description of Artifical Sequence:  Primer/Probe
tggcatttctgagcaggggccaccctgacttcaccttggcccaccatgagggtcttcctgctttgtgcctacatactgctgctgatggtttcccagttgagggcagtcagctttcctgaagatgatgaaccccttaatactgtcgactatcactgtaagtcgtctaggcaatatccggtttttagaggacgcccttcaggcaatgaatcgcagcacaggctggactttcagctgatgttgaaaattcgagacacactttatattgctggcagggatcaagtttatacagtaaacttaaatgaaatgcccaaaacagaagtaatatggcaacagaaactgacatggcgatcaagacaacaggatcgagaaaactgtgctatgaaaggcaagcataaagatgaatgccacaactttatcaaagtatttgttccaagaaacgatgagatggtttttgtttgtggtaccaatgcattcaatcccatgtgtagatactacagggtaagtaccttagaatatgatggggaagaaattagtggcctggcaagatgcccatttgatgccagacaaaccaatgttgccctctttgctgatgggaagctgtattctgccacagtggctgacttcttggccagcgatgccgttatttatcgaagcatgggtgatggatctgcccttcgcacaataaaatatgattccaaatggataaaagagccacactttcttcatgccatagaatatggaaactatgtctatttcttctttcgagaaatcgctgtcgaacataataatttaggcaaggctgtgtattcccgcgtggcccgcatatgtaaaaacgacatgggtggttcccagcgggtcctggagaaacactggacttcatttctaaaggctcggctgaactgttctgtccctggagattcgtttttctactttgatgttctgcagtctattacagacataatacaaatcaatggcatccccactgtggtcggggtgtttaccacgcagctcaatagcatccctggttctgctgtctgtgcatttagcatggatgacattgaaaaagtattcaaaggacggtttaaggaacagaaaactccagattctgtttggacagcagttcccgaagacaaagtgccaaagccaaggcctggctgttgtgcaaaacacggccttgccgaagcttataaaacctccatcgatttcccggatgaaactctgtcattcatcaaatctcatcccctgatggactctgccgttccacccattgccgatgagccctggttcacaaagactcgggtcaggtacagactgacggccatctcagtggaccattcagccggaccctaccagaactacacagtcatctttgttggctctgaagctggcatggtacttaaagttctggcaaagaccagtcctttctctttgaacgacagcgtattactggaagagattgaagcctacaaccatgcaaagtgcagtgctgagaatgaggaagacaaaaaggtcatctcattacagttggataaagatcaccacgctttatatgtggcgttctctagctgcattatccgcatccccctcagtcgctgtgagcgttatggatcatgtaaaaagtcttgtattgcatctcgtgacccgtattgtggctggttaagccagggatcctgtggtagagtgaccccagggatgctgctgttaaccgaagacttctttgctttccataaccacagtgctgaaggatatgaacaagacacagaattcggcaacacagctcatctaggggactgccatgaaattttgcctacttcaactacaccagattacaaaatatttggcggtccaacatctggtgtacgatgggaagtccagtctggagagtccaaccagatggtccacatgaatgtcctcatcacctgtgtctttgctgcttttgttttgggggcattcattgcaggtgtggcagtatactgctatcgagacatgtttgttcggaaaaacagaaagatccataaagatgcagagtccgcccagtcatgcacagactccagtggaagttttgccaaactgaatggtctctttgacagccctgtcaaggaataccaacagaatattgattctcctaaactgtatagtaacctgctaaccagtcggaaagagcacgaattcagcggccgctgaattctag

SEQ ID NO: 208 - protein, 712 aa, Artificial Sequence
  Description of Artifical Sequence:  Domain
MRVFLLCAYILLLMVSQLRAVSFPEDDEPLNTVDYHCKSSRQYPVFRGRPSGNESQHRLDFQLMLKIRDTLYIAGRDQVYTVNLNEMPKTEVIWQQKLTWRSRQQDRENCAMKGKHKDECHNFIKVFVPRNDEMVFVCGTNAFNPMCRYYRVSTLEYDGEEISGLARCPFDARQTNVALFADGKLYSATVADFLASDAVIYRSMGDGSALRTIKYDSKWIKEPHFLHAIEYGNYVYFFFREIAVEHNNLGKAVYSRVARICKNDMGGSQRVLEKHWTSFLKARLNCSVPGDSFFYFDVLQSITDIIQINGIPTVVGVFTTQLNSIPGSAVCAFSMDDIEKVFKGRFKEQKTPDSVWTAVPEDKVPKPRPGCCAKHGLAEAYKTSIDFPDETLSFIKSHPLMDSAVPPIADEPWFTKTRVRYRLTAISVDHSAGPYQNYTVIFVGSEAGMVLKVLAKTSPFSLNDSVLLEEIEAYNHAKCSAENEEDKKVISLQLDKDHHALYVAFSSCIIRIPLSRCERYGSCKKSCIASRDPYCGWLSQGSCGRVTPGMLLLTEDFFAFHNHSAEGYEQDTEFGNTAHLGDCHEILPTSTTPDYKIFGGPTSGVRWEVQSGESNQMVHMNVLITCVFAAFVLGAFIAGVAVYCYRDMFVRKNRKIHKDAESAQSCTDSSGSFAKLNGLFDSPVKEYQQNIDSPKLYSNLLTSRKEHEFSGR

SEQ ID NO: 209 - DNA, 3196 bp, Artificial Sequence
  Description of Artifical Sequence:  Primer/Probe
tggcatttctgagcaggggccaccctgacttcaccttggcccaccatgagggtcttcctgctttgtgcctacatactgctgctgatggtttcccagttgagggcagtcagctttcctgaagatgatgaaccccttaatactgtcgactatcactgtaagtcgtctaggcaatatccggtttttagaggacgcccttcaggcaatgaatcgcagcacaggctggactttcagctgatgttgaaaattcgagacacactttatattgctggcagggatcaagtttatacagtaaacttaaatgaaatgcccaaaacagaagtaatatggcaacagaaactgacatggcgatcaagacaacaggatcgagaaaactgtgctatgaaaggcaagcataaagatgaatgccacaactttatcaaagtatttgttccaagaaacgatgagatggtttttgtttgtggtaccaatgcattcaatcccatgtgtagatactacagggtaagtaccttagaatatgatggggaagaaattagtggcctggcaagatgcccatttgatgccagacaaaccaatgttgccctctttgctgatgggaagctgtattctgccacagtggctgacttcttggccagcgatgccgttatttatcgaagcatgggtgatggatctgcccttcgcacaataaaatatgattccaaatggataaaagagccacactttcttcatgccatagaatatggaaactatgtctatttcttctttcgagaaatcgctgtcgaacataataatttaggcaaggctgtgtattcccgcgtggcccgcatatgtaaaaacgacatgggtggttcccagcgggtcctggagaaacactggacttcatttctaaaggctcggctgaactgttctgtccctggagattcgtttttctactttgatgttctgcagtctattacagacataatacaaatcaatggcatccccactgtggtcggggtgtttaccacgcagctcaatagcatccctggttctgctgtctgtgcatttagcatggatgacattgaaaaagtattcaaaggacggtttaaggaacagaaaactccagattctgtttggacagcagttcccgaagacaaagtgccaaagccaaggcctggctgttgtgcaaaacacggccttgccgaagcttataaaacctccatcgatttcccggatgaaactctgtcattcatcaaatctcatcccctgatggactctgccgttccacccattgccgatgagccctggttcacaaagactcgggtcaggtacagactgacggccatctcagtggaccattcagccggaccctaccagaactacacagtcatctttgttggctctgaagctggcatggtacttaaagttctggcaaagaccagtcctttctctttgaacgacagcgtattactggaagagattgaagcctacaaccatgcaaagtgcagtgctgagaatgaggaagacaaaaaggtcatctcattacagttggataaagatcaccacgctttatatgtggcgttctctagctgcattatccgcatccccctcagtcgctgtgagcgttatggatcatgtaaaaagtcttgtattgcatctcgtgacccgtattgtggctggttaagccagggatcctgtggtagagtgaccccagggatgctgctgttaaccgaagacttctttgctttccataaccacagtgctgaaggatatgaacaagacacagaattcggcaacacagctcatctaggggactgccatgaaattttgcctacttcaactacaccagattacaaaatatttggcggtccaacatctggtgtacgatgggaagtccagtctggagagtccaaccagatggtccacatgaatgtcctcatcacctgtgtctttgctgcttttgttttgggggcattcattgcaggtgtggcagtatactgctatcgagacatgtttgttcggaaaaacagaaagatccataaagatgcagagtccgcccagtcatgcacagactccagtggaagttttgccaaactgaatggtctctttgacagccctgtcaaggaataccaacagaatattgattctcctaaactgtatagtaacctgctaaccagtcggaaagagctaccacccaatggagattctaaatccatggtaatggaccatcgagggcaacctccagagttggctgctcttcctactcctgagtctacacccgtgcttcaccagaagaccctgcaggccatgaagagccactcagaaaaggcccatggccatggagcttcaaggaaagaaacccctcagttttttccgtctagtccgccacctcattccccattaagtcatgggcatatccccagtgccattgttcttccaaatgctacccatgactacaacacgtctttctcaaactccaatgctcacaaagctgaaaagaagcttcaaaacattgatcaccctctcacaaagtcatccagtaagagagatcaccggcgttctgttgattccagaaataccctcaatgatctcctgaagcatctgaatgacccaaatagtaaccccaaagccatcatgggagacatccagatggcacaccagaacttaatgctggatcccatgggatcgatgtctgaggtcccacctaaagtccctaaccgggaggcatcgctatactcccctccttcaactctccccagaaatagcccaaccaagcgagtggatgtccccaccactcctggagtcccaatgacttctctggaaagacaaagaggttatcacaaaaattcctcccagaggcactctatatctgctatgcctaaaaacttaaactcaccaaatggtgttttgttatccagacagcctagtatgaaccgtggaggatatatgcccacccccactggggcgaaggtggactatattcagggaacaccagtgagtgttcatctgcagccttccctctccagacagagcagctacaccagtaatggcactcttcctaggacgggactaaagaggacgccgtccttaaaacctgacgtgccaccaaagccttcctttgttcctcaaaccccatctgtcagaccactgaacaaatacacatactaggcctcaagtgtgctattcccatgtggctttatcctgtccgtgttgttgagag

SEQ ID NO: 210 - protein, 1032 aa, Artificial Sequence
  Description of Artifical Sequence:  Domain
MRVFLLCAYILLLMVSQLRAVSFPEDDEPLNTVDYHCKSSRQYPVFRGRPSGNESQHRLDFQLMLKIRDTLYIAGRDQVYTVNLNEMPKTEVIWQQKLTWRSRQQDRENCAMKGKHKDECHNFIKVFVPRNDEMVFVCGTNAFNPMCRYYRVSTLEYDGEEISGLARCPFDARQTNVALFADGKLYSATVADFLASDAVIYRSMGDGSALRTIKYDSKWIKEPHFLHAIEYGNYVYFFFREIAVEHNNLGKAVYSRVARICKNDMGGSQRVLEKHWTSFLKARLNCSVPGDSFFYFDVLQSITDIIQINGIPTVVGVFTTQLNSIPGSAVCAFSMDDIEKVFKGRFKEQKTPDSVWTAVPEDKVPKPRPGCCAKHGLAEAYKTSIDFPDETLSFIKSHPLMDSAVPPIADEPWFTKTRVRYRLTAISVDHSAGPYQNYTVIFVGSEAGMVLKVLAKTSPFSLNDSVLLEEIEAYNHAKCSAENEEDKKVISLQLDKDHHALYVAFSSCIIRIPLSRCERYGSCKKSCIASRDPYCGWLSQGSCGRVTPGMLLLTEDFFAFHNHSAEGYEQDTEFGNTAHLGDCHEILPTSTTPDYKIFGGPTSGVRWEVQSGESNQMVHMNVLITCVFAAFVLGAFIAGVAVYCYRDMFVRKNRKIHKDAESAQSCTDSSGSFAKLNGLFDSPVKEYQQNIDSPKLYSNLLTSRKELPPNGDSKSMVMDHRGQPPELAALPTPESTPVLHQKTLQAMKSHSEKAHGHGASRKETPQFFPSSPPPHSPLSHGHIPSAIVLPNATHDYNTSFSNSNAHKAEKKLQNIDHPLTKSSSKRDHRRSVDSRNTLNDLLKHLNDPNSNPKAIMGDIQMAHQNLMLDPMGSMSEVPPKVPNREASLYSPPSTLPRNSPTKRVDVPTTPGVPMTSLERQRGYHKNSSQRHSISAMPKNLNSPNGVLLSRQPSMNRGGYMPTPTGAKVDYIQGTPVSVHLQPSLSRQSSYTSNGTLPRTGLKRTPSLKPDVPPKPSFVPQTPSVRPLNKYTY

SEQ ID NO: 211 - DNA, 2359 bp, Artificial Sequence
  Description of Artifical Sequence:  Primer/Probe
tggcatttctgagcaggggccaccctgacttcaccttggcccaccatgagggtcttcctgctttgtgcctacatactgctgctgatggtttcccagttgagggcagtcagctttcctgaagatgatgaaccccttaatactgtcgactatcactgtaagtcgtctaggcaatatccggtttttagaggacgcccttcaggcaatgaatcgcagcacaggctggactttcagctgatgttgaaaattcgagacacactttatattgctggcagggatcaagtttatacagtaaacttaaatgaaatgcccaaaacagaagtaatatggcaacagaaactgacatggcgatcaagacaacaggatcgagaaaactgtgctatgaaaggcaagcataaagatgaatgccacaactttatcaaagtatttgttccaagaaacgatgagatggtttttgtttgtggtaccaatgcattcaatcccatgtgtagatactacagggtaagtaccttagaatatgatggggaagaaattagtggcctggcaagatgcccatttgatgccagacaaaccaatgttgccctctttgctgatgggaagctgtattctgccacagtggctgacttcttggccagcgatgccgttatttatcgaagcatgggtgatggatctgcccttcgcacaataaaatatgattccaaatggataaaagagccacactttcttcatgccatagaatatggaaactatgtctatttcttctttcgagaaatcgctgtcgaacataataatttaggcaaggctgtgtattcccgcgtggcccgcatatgtaaaaacgacatgggtggttcccagcgggtcctggagaaacactggacttcatttctaaaggctcggctgaactgttctgtccctggagattcgtttttctactttgatgttctgcagtctattacagacataatacaaatcaatggcatccccactgtggtcggggtgtttaccacgcagctcaatagcatccctggttctgctgtctgtgcatttagcatggatgacattgaaaaagtattcaaaggacggtttaaggaacagaaaactccagattctgtttggacagcagttcccgaagacaaagtgccaaagccaaggcctggctgttgtgcaaaacacggccttgccgaagcttataaaacctccatcgatttcccggatgaaactctgtcattcatcaaatctcatcccctgatggactctgccgttccacccattgccgatgagccctggttcacaaagactcgggtcaggtacagactgacggccatctcagtggaccattcagccggaccctaccagaactacacagtcatctttgttggctctgaagctggcatggtacttaaagttctggcaaagaccagtcctttctctttgaacgacagcgtattactggaagagattgaagcctacaaccatgcaaagtgcagtgctgagaatgaggaagacaaaaaggtcatctcattacagttggataaagatcaccacgctttatatgtggcgttctctagctgcattatccgcatccccctcagtcgctgtgagcgttatggatcatgtaaaaagtcttgtattgcatctcgtgacccgtattgtggctggttaagccagggatcctgtggtagagtgaccccagggatgctgctgttaaccgaagacttctttgctttccataaccacagtgctgaaggatatgaacaagacacagaattcggcaacacagctcatctaggggactgccatgaaattttgcctacttcaactacaccagattacaaaatatttggcggtccaacatctgacatggaggtatcttcatcttctgttaccacaatggcaagtatcccagaaatcacacctaaagtgattgatacctggagacctaaactgacaagctctcggaaatttgtagttcaagatgatccaaacacttctgattttactgatcctttatcgggtatcccaaagggtgtacgatgggaagtccagtctggagagtccaaccagatggtccacatgaatgtcctcatcacctgtgtctttgctgcttttgttttgggggcattcattgcaggtgtggcagtatactgctatcgagacatgtttgttcggaaaaacagaaagatccataaagatgcagagtccgcccagtcatgcacagactccagtggaagttttgccaaactgaatggtctctttgacagccctgtcaaggaataccaacagaatattgattctcctaaactgtatagtaacctgctaaccagtcggaaagagcacgaattcagcggccgctgaattctag

SEQ ID NO: 212 - protein, 768 aa, Artificial Sequence
  Description of Artifical Sequence:  Domain
MRVFLLCAYILLLMVSQLRAVSFPEDDEPLNTVDYHCKSSRQYPVFRGRPSGNESQHRLDFQLMLKIRDTLYIAGRDQVYTVNLNEMPKTEVIWQQKLTWRSRQQDRENCAMKGKHKDECHNFIKVFVPRNDEMVFVCGTNAFNPMCRYYRVSTLEYDGEEISGLARCPFDARQTNVALFADGKLYSATVADFLASDAVIYRSMGDGSALRTIKYDSKWIKEPHFLHAIEYGNYVYFFFREIAVEHNNLGKAVYSRVARICKNDMGGSQRVLEKHWTSFLKARLNCSVPGDSFFYFDVLQSITDIIQINGIPTVVGVFTTQLNSIPGSAVCAFSMDDIEKVFKGRFKEQKTPDSVWTAVPEDKVPKPRPGCCAKHGLAEAYKTSIDFPDETLSFIKSHPLMDSAVPPIADEPWFTKTRVRYRLTAISVDHSAGPYQNYTVIFVGSEAGMVLKVLAKTSPFSLNDSVLLEEIEAYNHAKCSAENEEDKKVISLQLDKDHHALYVAFSSCIIRIPLSRCERYGSCKKSCIASRDPYCGWLSQGSCGRVTPGMLLLTEDFFAFHNHSAEGYEQDTEFGNTAHLGDCHEILPTSTTPDYKIFGGPTSDMEVSSSSVTTMASIPEITPKVIDTWRPKLTSSRKFVVQDDPNTSDFTDPLSGIPKGVRWEVQSGESNQMVHMNVLITCVFAAFVLGAFIAGVAVYCYRDMFVRKNRKIHKDAESAQSCTDSSGSFAKLNGLFDSPVKEYQQNIDSPKLYSNLLTSRKEHEFSGR

SEQ ID NO: 213 - DNA, 3364 bp, Artificial Sequence
  Description of Artifical Sequence:  Primer/Probe
tggcatttctgagcaggggccaccctgacttcaccttggcccaccatgagggtcttcctgctttgtgcctacatactgctgctgatggtttcccagttgagggcagtcagctttcctgaagatgatgaaccccttaatactgtcgactatcactgtaagtcgtctaggcaatatccggtttttagaggacgcccttcaggcaatgaatcgcagcacaggctggactttcagctgatgttgaaaattcgagacacactttatattgctggcagggatcaagtttatacagtaaacttaaatgaaatgcccaaaacagaagtaatatggcaacagaaactgacatggcgatcaagacaacaggatcgagaaaactgtgctatgaaaggcaagcataaagatgaatgccacaactttatcaaagtatttgttccaagaaacgatgagatggtttttgtttgtggtaccaatgcattcaatcccatgtgtagatactacagggtaagtaccttagaatatgatggggaagaaattagtggcctggcaagatgcccatttgatgccagacaaaccaatgttgccctctttgctgatgggaagctgtattctgccacagtggctgacttcttggccagcgatgccgttatttatcgaagcatgggtgatggatctgcccttcgcacaataaaatatgattccaaatggataaaagagccacactttcttcatgccatagaatatggaaactatgtctatttcttctttcgagaaatcgctgtcgaacataataatttaggcaaggctgtgtattcccgcgtggcccgcatatgtaaaaacgacatgggtggttcccagcgggtcctggagaaacactggacttcatttctaaaggctcggctgaactgttctgtccctggagattcgtttttctactttgatgttctgcagtctattacagacataatacaaatcaatggcatccccactgtggtcggggtgtttaccacgcagctcaatagcatccctggttctgctgtctgtgcatttagcatggatgacattgaaaaagtattcaaaggacggtttaaggaacagaaaactccagattctgtttggacagcagttcccgaagacaaagtgccaaagccaaggcctggctgttgtgcaaaacacggccttgccgaagcttataaaacctccatcgatttcccggatgaaactctgtcattcatcaaatctcatcccctgatggactctgccgttccacccattgccgatgagccctggttcacaaagactcgggtcaggtacagactgacggccatctcagtggaccattcagccggaccctaccagaactacacagtcatctttgttggctctgaagctggcatggtacttaaagttctggcaaagaccagtcctttctctttgaacgacagcgtattactggaagagattgaagcctacaaccatgcaaagtgcagtgctgagaatgaggaagacaaaaaggtcatctcattacagttggataaagatcaccacgctttatatgtggcgttctctagctgcattatccgcatccccctcagtcgctgtgagcgttatggatcatgtaaaaagtcttgtattgcatctcgtgacccgtattgtggctggttaagccagggatcctgtggtagagtgaccccagggatgctgctgttaaccgaagacttctttgctttccataaccacagtgctgaaggatatgaacaagacacagaattcggcaacacagctcatctaggggactgccatgaaattttgcctacttcaactacaccagattacaaaatatttggcggtccaacatctgacatggaggtatcttcatcttctgttaccacaatggcaagtatcccagaaatcacacctaaagtgattgatacctggagacctaaactgacaagctctcggaaatttgtagttcaagatgatccaaacacttctgattttactgatcctttatcgggtatcccaaagggtgtacgatgggaagtccagtctggagagtccaaccagatggtccacatgaatgtcctcatcacctgtgtctttgctgcttttgttttgggggcattcattgcaggtgtggcagtatactgctatcgagacatgtttgttcggaaaaacagaaagatccataaagatgcagagtccgcccagtcatgcacagactccagtggaagttttgccaaactgaatggtctctttgacagccctgtcaaggaataccaacagaatattgattctcctaaactgtatagtaacctgctaaccagtcggaaagagctaccacccaatggagatactaaatccatggtaatggaccatcgagggcaacctccagagttggctgctcttcctactcctgagtctacacccgtgcttcaccagaagaccctgcaggccatgaagagccactcagaaaaggcccatggccatggagcttcaaggaaagaaacccctcagttttttccgtctagtccgccacctcattccccattaagtcatgggcatatccccagtgccattgttcttccaaatgctacccatgactacaacacgtctttctcaaactccaatgctcacaaagctgaaaagaagcttcaaaacattgatcaccctctcacaaagtcatccagtaagagagatcaccggcgttctgttgattccagaaataccctcaatgatctcctgaagcatctgaatgacccaaatagtaaccccaaagccatcatgggagacatccagatggcacaccagaacttaatgctggatcccatgggatcgatgtctgaggtcccacctaaagtccctaaccgggaggcatcgctatactcccctccttcaactctccccagaaatagcccaaccaagcgagtggatgtccccaccactcctggagtcccaatgacttctctggaaagacaaagaggttatcacaaaaattcctcccagaggcactctatatctgctatgcctaaaaacttaaactcaccaaatggtgttttgttatccagacagcctagtatgaaccgtggaggatatatgcccacccccactggggcgaaggtggactatattcagggaacaccagtgagtgttcatctgcagccttccctctccagacagagcagctacaccagtaatggcactcttcctaggacgggactaaagaggacgccgtccttaaaacctgacgtgccaccaaagccttcctttgttcctcaaaccccatctgtcagaccactgaacaaatacacatactaggcctcaagtgtgctattcccatgtggctttatcctgtccgtgttgttgagag

SEQ ID NO: 214 - protein, 1088 aa, Artificial Sequence
  Description of Artifical Sequence:  Domain
MRVFLLCAYILLLMVSQLRAVSFPEDDEPLNTVDYHCKSSRQYPVFRGRPSGNESQHRLDFQLMLKIRDTLYIAGRDQVYTVNLNEMPKTEVIWQQKLTWRSRQQDRENCAMKGKHKDECHNFIKVFVPRNDEMVFVCGTNAFNPMCRYYRVSTLEYDGEEISGLARCPFDARQTNVALFADGKLYSATVADFLASDAVIYRSMGDGSALRTIKYDSKWIKEPHFLHAIEYGNYVYFFFREIAVEHNNLGKAVYSRVARICKNDMGGSQRVLEKHWTSFLKARLNCSVPGDSFFYFDVLQSITDIIQINGIPTVVGVFTTQLNSIPGSAVCAFSMDDIEKVFKGRFKEQKTPDSVWTAVPEDKVPKPRPGCCAKHGLAEAYKTSIDFPDETLSFIKSHPLMDSAVPPIADEPWFTKTRVRYRLTAISVDHSAGPYQNYTVIFVGSEAGMVLKVLAKTSPFSLNDSVLLEEIEAYNHAKCSAENEEDKKVISLQLDKDHHALYVAFSSCIIRIPLSRCERYGSCKKSCIASRDPYCGWLSQGSCGRVTPGMLLLTEDFFAFHNHSAEGYEQDTEFGNTAHLGDCHEILPTSTTPDYKIFGGPTSDMEVSSSSVTTMASIPEITPKVIDTWRPKLTSSRKFVVQDDPNTSDFTDPLSGIPKGVRWEVQSGESNQMVHMNVLITCVFAAFVLGAFIAGVAVYCYRDMFVRKNRKIHKDAESAQSCTDSSGSFAKLNGLFDSPVKEYQQNIDSPKLYSNLLTSRKELPPNGDTKSMVMDHRGQPPELAALPTPESTPVLHQKTLQAMKSHSEKAHGHGASRKETPQFFPSSPPPHSPLSHGHIPSAIVLPNATHDYNTSFSNSNAHKAEKKLQNIDHPLTKSSSKRDHRRSVDSRNTLNDLLKHLNDPNSNPKAIMGDIQMAHQNLMLDPMGSMSEVPPKVPNREASLYSPPSTLPRNSPTKRVDVPTTPGVPMTSLERQRGYHKNSSQRHSISAMPKNLNSPNGVLLSRQPSMNRGGYMPTPTGAKVDYIQGTPVSVHLQPSLSRQSSYTSNGTLPRTGLKRTPSLKPDVPPKPSFVPQTPSVRPLNKYTY

SEQ ID NO: 215 - DNA, 3231 bp, Artificial Sequence
  Description of Artifical Sequence:  Primer/Probe
cgcagatctatgagggtcttcctgctttgtgcctacatactgctgctgatggtttcccagttgagggcagtcagctttcctgaagatgatgaaccccttaatactgtcgactatcactattcaaggcaatatccggtttttagaggacgcccttcaggcaatgaatcgcagcacaggctggactttcagctgatgttgaaaattcgagacacactttatattgctggcagggatcaagtttatacagtaaacttaaatgaaatgcccaaaacagaagtaataccaaacaagaaactgacatggcgatcaagacaacaggatcgagaaaactgtgctatgaaaggcaagcataaagatgaatgccacaactttatcaaagtatttgttccaagaaacgatgagatggtttttgtttgtggtaccaatgcattcaatcccatgtgtagatactacaggttgagtaccttagaatatgatggggaagaaattagtggcctggcaagatgcccatttgatgccagacaaaccaatgttgccctctttgctgatgggaagctgtattctgccacagtggctgacttcttggccagcgatgccgttatttatcgaagcatgggtgatggatctgcccttcgcacaataaaatatgattccaaatggataaaagagccacactttcttcatgccatagaatatggaaactatgtctatttcttctttcgagaaatcgctgtcgaacataataatttaggcaaggctgtgtattcccgcgtggcccgcatatgtaaaaacgacatgggtggttcccagcgggtcctggagaaacactggacttcatttctaaaggctcggctgaactgttctgtccctggagattcgtttttctactttgatgttctgcagtctattacagacataatacaaatcaatggcatccccactgtggtcggggtgtttaccacgcagctcaatagcatccctggttctgctgtctgtgcatttagcatggatgacattgaaaaagtattcaaaggacggtttaaggaacagaaaactccagattctgtttggacagcagttcccgaagacaaagtgccaaagccaaggcctggctgttgtgcaaaacacggccttgccgaagcttataaaacctccatcgatttcccggatgaaactctgtcattcatcaaatctcatcccctgatggactctgccgttccacccattgctgatgagccctggttcacaaagactcgggtcaggtacagactgacggccatctcagtggaccattcagccggaccctaccagaactacacagtcatctttgttggctctgaagctggcatggtacttaaagttctggcaaagaccagtcctttctctttgaacgacagcgtattactggaagagattgaagcctacaaccatgcaaagtgcagtgctgagaatgaggaagacaaaaaggtcatctcattacagttggataaagatcaccacgctttatatgtggcgttctctagctgcattatccgcatccccctcagtcgctgtgagcgttatggatcatgtaaaaagtcttgtattgcatctcgtgacccgtattgtggctggttaagccagggatcctgtggtagagtgaccccagggatgcttgctgaaggatatgaacaagacacagaattcggcaacacagctcatctaggggactgccatgaaattttgcctacttcaactacaccagattacaaaatatttggcggtccaacatctgacatggaggtatcttcatcttctgttaccacaatggcaagtatcccagaaatcacacctaaagtgattgatacctggagacctaaactgacaagctctcggaaatttgtagttcaagatgatccaaacacttctgattttactgatcctttatcgggtatcccaaagggtgtacgatgggaagtccagtctggagagtccaaccagatggtccacatgaatgtcctcatcacctgtgtctttgctgcttttgttttgggggcattcattgcaggtgtggcagtatactgctatcgagacatgtttgttcggaaaaacagaaagatccataaagatgcagagtccgcccagtcatgcacagactccagtggaagttttgccaaactgaatggtctctttgacagccctgtcaaggaataccaacagaatattgattctcctaaactgtatagtaacctgctaaccagtcggaaagagctaccacccaatggagatactaaatccatggtaatggaccatcgagggcaacctccagagttggctgctcttcctactcctgagtctacacccgtgcttcaccagaagaccctgcaggccatgaagagccactcagaaaaggcccatggccatggagcttcaaggaaagaaacccctcagttttttccgtctagtccgccacctcattccccattaagtcatgggcatatccccagtgccattgttcttccaaatgctacccatgactacaacacgtctttctcaaactccaatgctcacaaagctgaaaagaagcttcaaaacattgatcaccctctcacaaagtcatccagtaagagagatcaccggcgttctgttgattccagaaataccctcaatgatctcctgaagcatctgaatgacccaaatagtaaccccaaagccatcatgggagacatccagatggcacaccagaacttaatgctggatcccatgggatcgatgtctgaggtcccacctaaagtccctaaccgggaggcatcgctatactcccctccttcaactctccccagaaatagcccaaccaagcgagtggatgtccccaccactcctggagtcccaatgacttctctggaaagacaaagaggttatcacaaaaattcctcccagaggcactctatatctgctatgcctaaaaacttaaactcaccaaatggtgttttgttatccagacagcctagtatgaaccgtggaggatatatgcccacccccactggggcgaaggtggactatattcagggaacaccagtgagtgttcatctgcagccttccctctccagacagagcagctacaccagtaatggcactcttcctaggacgggactaaagaggacgccgtccttaaaacctgacgtgccaccaaagccttcctttgttcctcaaaccccatctgtcagaccactgaacaaatacacatactga

SEQ ID NO: 216 - protein, 1073 aa, Artificial Sequence
  Description of Artifical Sequence:  Domain
MRVFLLCAYILLLMVSQLRAVSFPEDDEPLNTVDYHYSRQYPVFRGRPSGNESQHRLDFQLMLKIRDTLYIAGRDQVYTVNLNEMPKTEVIPNKKLTWRSRQQDRENCAMKGKHKDECHNFIKVFVPRNDEMVFVCGTNAFNPMCRYYRLSTLEYDGEEISGLARCPFDARQTNVALFADGKLYSATVADFLASDAVIYRSMGDGSALRTIKYDSKWIKEPHFLHAIEYGNYVYFFFREIAVEHNNLGKAVYSRVARICKNDMGGSQRVLEKHWTSFLKARLNCSVPGDSFFYFDVLQSITDIIQINGIPTVVGVFTTQLNSIPGSAVCAFSMDDIEKVFKGRFKEQKTPDSVWTAVPEDKVPKPRPGCCAKHGLAEAYKTSIDFPDETLSFIKSHPLMDSAVPPIADEPWFTKTRVRYRLTAISVDHSAGPYQNYTVIFVGSEAGMVLKVLAKTSPFSLNDSVLLEEIEAYNHAKCSAENEEDKKVISLQLDKDHHALYVAFSSCIIRIPLSRCERYGSCKKSCIASRDPYCGWLSQGSCGRVTPGMLAEGYEQDTEFGNTAHLGDCHEILPTSTTPDYKIFGGPTSDMEVSSSSVTTMASIPEITPKVIDTWRPKLTSSRKFVVQDDPNTSDFTDPLSGIPKGVRWEVQSGESNQMVHMNVLITCVFAAFVLGAFIAGVAVYCYRDMFVRKNRKIHKDAESAQSCTDSSGSFAKLNGLFDSPVKEYQQNIDSPKLYSNLLTSRKELPPNGDTKSMVMDHRGQPPELAALPTPESTPVLHQKTLQAMKSHSEKAHGHGASRKETPQFFPSSPPPHSPLSHGHIPSAIVLPNATHDYNTSFSNSNAHKAEKKLQNIDHPLTKSSSKRDHRRSVDSRNTLNDLLKHLNDPNSNPKAIMGDIQMAHQNLMLDPMGSMSEVPPKVPNREASLYSPPSTLPRNSPTKRVDVPTTPGVPMTSLERQRGYHKNSSQRHSISAMPKNLNSPNGVLLSRQPSMNRGGYMPTPTGAKVDYIQGTPVSVHLQPSLSRQSSYTSNGTLPRTGLKRTPSLKPDVPPKPSFVPQTPSVRPLNKYTY

SEQ ID NO: 217 - DNA, 1950 bp, Artificial Sequence
  Description of Artifical Sequence:  Primer/Probe
cgcagatctgtcagctttcctgaagatgatgaaccccttaatactgtcgactatcactattcaaggcaatatccggtttttagaggacgcccttcaggcaatgaatcgcagcacaggctggactttcagctgatgttgaaaattcgagacacactttatattgctggcagggatcaagtttatacagtaaacttaaatgaaatgcccaaaacagaagtaatacccaacaagaaactgacatggcgatcaagacaacaggatcgagaaaactgtgctatgaaaggcaagcataaagatgaatgccacaactttatcaaagtatttgttccaagaaacgatgagatggtttttgtttgtggtaccaatgcattcaatcccatgtgtagatactacaggttgagtaccttagaatatgatggggaagaaattagtggcctggcaagatgcccatttgatgccagacaaaccaatgttgccctctttgctgatgggaagctgtattctgccacagtggctgacttcttggccagcgatgccgttatttatcgaagcatgggtgatggatctgcccttcgcacaataaaatatgattccaaatggataaaagagccacactttcttcatgccatagaatatggaaactatgtctatttcttctttcgagaaatcgctgtcgaacataataatttaggcaaggctgtgtattcccgcgtggcccgcatatgtaaaaacgacatgggtggttcccagcgggtcctggagaaacactggacttcatttctaaaggctcggctgaactgttctgtccctggagattcgtttttctactttgatgttctgcagtctattacagacataatacaaatcaatggcatccccactgtggtcggggtgtttaccacgcagctcaatagcatccctggttctgctgtctgtgcatttagcatggatgacattgaaaaagtattcaaaggacggtttaaggaacagaaaactccagattctgtttggacagcagttcccgaagacaaagtgccaaagccaaggcctggctgttgtgcaaaacacggccttgccgaagcttataaaacctccatcgatttcccggatgaaactctgtcattcatcaaatctcatcccctgatggactctgccgttccacccattgctgatgagccctggttcacaaagactcgggtcaggtacagactgacggccatctcagtggaccattcagccggaccctaccagaactacacagtcatctttgttggctctgaagctggcatggtacttaaagttctggcaaagaccagtcctttctctttgaacgacagcgtattactggaagagattgaagcctacaaccatgcaaagtgcagtgctgagaatgaggaagacaaaaaggtcatctcattacagttggataaagatcaccacgctttatatgtggcgttctctagctgcattatccgcatccccctcagtcgctgtgagcgttatggatcatgtaaaaagtcttgtattgcatctcgtgacccgtattgtggctggttaagccagggatcctgtggtagagtgaccccagggatgctgctgttaaccgaagacttctttgctttccataaccacagtgctgaaggatatgaacaagacacagaattcggcaacacagctcatctaggggactgccatgaaattttgcctacttcaactacaccagattacaaaatatttggcggtccaacatctgacatggaggtatcttcatcttctgttaccacaatggcaagtatcccagaaatcacacctaaagtgattgatacctggagacctaaactgacaagctctcggaaatttgtagttcaagatgatccaaacacttctgattttactgatcctttatcgggtatcccaaagggtgtacgatgggaagtccagctcgaggcg

SEQ ID NO: 218 - protein, 644 aa, Artificial Sequence
  Description of Artifical Sequence:  Domain
VSFPEDDEPLNTVDYHYSRQYPVFRGRPSGNESQHRLDFQLMLKIRDTLYIAGRDQVYTVNLNEMPKTEVIPNKKLTWRSRQQDRENCAMKGKHKDECHNFIKVFVPRNDEMVFVCGTNAFNPMCRYYRLSTLEYDGEEISGLARCPFDARQTNVALFADGKLYSATVADFLASDAVIYRSMGDGSALRTIKYDSKWIKEPHFLHAIEYGNYVYFFFREIAVEHNNLGKAVYSRVARICKNDMGGSQRVLEKHWTSFLKARLNCSVPGDSFFYFDVLQSITDIIQINGIPTVVGVFTTQLNSIPGSAVCAFSMDDIEKVFKGRFKEQKTPDSVWTAVPEDKVPKPRPGCCAKHGLAEAYKTSIDFPDETLSFIKSHPLMDSAVPPIADEPWFTKTRVRYRLTAISVDHSAGPYQNYTVIFVGSEAGMVLKVLAKTSPFSLNDSVLLEEIEAYNHAKCSAENEEDKKVISLQLDKDHHALYVAFSSCIIRIPLSRCERYGSCKKSCIASRDPYCGWLSQGSCGRVTPGMLLLTEDFFAFHNHSAEGYEQDTEFGNTAHLGDCHEILPTSTTPDYKIFGGPTSDMEVSSSSVTTMASIPEITPKVIDTWRPKLTSSRKFVVQDDPNTSDFTDPLSGIPKGVRWEVQ

SEQ ID NO: 219 - DNA, 1894 bp, Artificial Sequence
  Description of Artifical Sequence:  Primer/Probe
tggcatttctgagcaggggccaccctgacttcaccttggcccaccatgagggtcttcctgctttgtgcctacatactgctgctgatggtttcccagttgagggcagtcagctttcctgaagatgatgaaccccttaatactgtcgactatcactattcaaggcaatatccggtttttagaggacgcccttcaggcaatgaatcgcagcacaggccggactttcagctgatgttgaaaattcgagacacactttatattgctggcagggatcaagtttatacagtaaacttaaatgaaatgcccaaaacagaagtaatacccaacaagaaactgacatggcgatcaagacaacaggatcgagaaaactgtgctatgaaaggcaagcataaagatgaatgccacaactttatcaaagtatttgttccaagaaacgatgagatggtttttgtttgtggtaccaatgcattcaatcccatgtgtagatactacaggttgagtaccttagaatatgatggggaagaaattagtggcctggcaagatgcccatttgatgccagacaaaccaatgttgccctctttgctgatgggaagctgtattctgccacagtggctgacttcttggccagcgatgccgttatttatcgaagcatgggtgatggatctgcccttcgcacaataaaatatgattccaaatggataaaagagccacactttcttcatgccatagaatatggaaactatgtctatttcttctttcgagaaatcgctgtcgaacataataatttaggcaaggctgtgtattcccgcgtggcccgcatatgtaaaaacgacatgggtggttcccagcgggtcctggagaaacactggacttcatttctaaaggctcggctgaactgttctgtccctggagattcgtttttctactttgatgttctgcagtctattacagacataatacaaatcaatggcatccccactgtggtcggggtgtttaccacgcagctcaatagcatccctggttctgctgtctgtgcatttagcatggatgacattgaaaaagtattcaaaggacggtttaaggaacagaaaactccagattctgtttggacagcagttcccgaagacaaagtgccaaagccaaggcctggctgttgtgcaaaacacggccttgccgaagcttataaaacctccatcgatttcccggatgaaactctgtcattcatcaaatctcatcccctgatggactctgccgttccacccattgccgatgagccctggttcacaaagactcgggtcaggtacagactgacggccatctcagtggaccattcagccggaccctaccagaactacacagtcatctttgttggctctgaagctggcatggtacttaaagttctggcaaagaccagtcctttctctttgaacgacagcgtattactggaagagattgaagcctacaaccatgcaaagtaggtatatgttacgagaacgcccttcagcactgctcaaaaattttcggcatgtatttcatctagtcatgtccttttggtcctctaaattagcagtggtttggcataatagtgttttgtgttttttttctcattgaaataaatcttgggtttgtttttttcccgagcctgctagggcgaggggggtgaatggttgatgagtttaaaaataatgcagcccttgtttttcacctgtagaatatgagaacattttaacagcacctctcttatcttgcagatatattccaagatgctacatgcagcagacagctgtgagcttgcatacacacacacacaaatatacatgcacatacatacacagaatgtagtactagttaagtatttccttcctatctttaataagtaagagaatatttagacca

SEQ ID NO: 220 - protein, 476 aa, Artificial Sequence
  Description of Artifical Sequence:  Domain
MRVFLLCAYILLLMVSQLRAVSFPEDDEPLNTVDYHYSRQYPVFRGRPSGNESQHRPDFQLMLKIRDTLYIAGRDQVYTVNLNEMPKTEVIPNKKLTWRSRQQDRENCAMKGKHKDECHNFIKVFVPRNDEMVFVCGTNAFNPMCRYYRLSTLEYDGEEISGLARCPFDARQTNVALFADGKLYSATVADFLASDAVIYRSMGDGSALRTIKYDSKWIKEPHFLHAIEYGNYVYFFFREIAVEHNNLGKAVYSRVARICKNDMGGSQRVLEKHWTSFLKARLNCSVPGDSFFYFDVLQSITDIIQINGIPTVVGVFTTQLNSIPGSAVCAFSMDDIEKVFKGRFKEQKTPDSVWTAVPEDKVPKPRPGCCAKHGLAEAYKTSIDFPDETLSFIKSHPLMDSAVPPIADEPWFTKTRVRYRLTAISVDHSAGPYQNYTVIFVGSEAGMVLKVLAKTSPFSLNDSVLLEEIEAYNHAK

SEQ ID NO: 221 - DNA, 1894 bp, Artificial Sequence
  Description of Artifical Sequence:  Primer/Probe
tggcatttctgagcaggggccaccctgacttcaccttggcccaccatgagggtcttcctgctttgtgcctacatactgctgctgatggtttcccagttgagggcagtcagctttcctgaagatgatgaaccccttaatactgtcgactatcactattcaaggcaatatccggtttttagaggacgcccttcaggcaatgaatcgcagcacaggctggactttcagctgatgttgaaaattcgagacacactttatattgctggcagggatcaagtttatacagtaaacttaaatgaaatgcccaaaacagaagtaatacccaacaagaaactgacatggcgatcaagacaacaggatcgagaaaactgtgctatgaaaggcaagcataaagatgaatgccacaactttatcaaagtatttgttccaagaaacgatgagatggtttttgtttgtggtaccaatgcattcaatcccatgtgtagatactacaggttgagtaccttagaatatgatggggaagaaattagtggcctggcaagatgcccatttgatgccagacaaaccaatgttgccctctttgctgatgggaagctgtattctgccacagtggctgacttcttggccagcgatgccgttatttatcgaagcatgggtgatggatctgcccttcgcacaataaaatatgattccaaatggataaaagagccacactttcttcatgccatagaatatggaaactatgtctatttcttctttcgagaaatcgctgtcgaacataataatttaggcaaggctgtgtattcccgcgtggcccgcatatgtaaaaacgacatgggtggttcccagcgggtcctggagaaacaccggacttcatttctaaaggctcggctgaactgttctgtccctggagattcgtttttctactttgatgttctgcagtctattacagacataatacaaatcaatggcatccccactgtggtcggggtgtttaccacgcagctcaatagcatccctggttctgctgtctgtgcatttagcatggatgacattgaaaaagtattcaaaggacggtttaaggaacagaaaactccagattctgtttggacagcagttcccgaagacaaagtgccaaagccaaggcctggctgttgtgcaaaacacggccttgccgaagcttataaaacctccatcgatttcccggatgaaactctgtcattcatcaaatctcatcccctgatggactctgccgttccacccattgccgatgagccctggttcacaaagactcgggtcaggtacagactgacggccatctcagtggaccattcagccggaccctaccagaactacacagtcatctttgttggctctgaagctggcatggtacttaaagttctggcaaagaccagtcctttctctttgaacgacagcgtattactggaagagattgaagcctacaaccatgcaaagtaggtatatgttacgagaacgcccttcagcactgctcaaaaattttcggcatgtatttcatctagtcatgtccttttggtcctctaaattagcagtggtttggcataatagtgttttgtgttttttttctcattgaaataaatcttgggtttgtttttttcccgagcctgctagggcgaggggggtgaatggttgatgagtttaaaaataatgcagcccttgtttttcacctgtagaatatgagaacattttaacagcacctctcttatcttgcagatatattccaagatgctacatgcagcagacagctgtgagcttgcatacacacacacacaaatatacatgcacatacatacacagaatgtagtactagttaagtatttccttcctatctttaataagtaagagaatatttagacca

SEQ ID NO: 222 - protein, 476 aa, Artificial Sequence
  Description of Artifical Sequence:  Domain
MRVFLLCAYILLLMVSQLRAVSFPEDDEPLNTVDYHYSRQYPVFRGRPSGNESQHRLDFQLMLKIRDTLYIAGRDQVYTVNLNEMPKTEVIPNKKLTWRSRQQDRENCAMKGKHKDECHNFIKVFVPRNDEMVFVCGTNAFNPMCRYYRLSTLEYDGEEISGLARCPFDARQTNVALFADGKLYSATVADFLASDAVIYRSMGDGSALRTIKYDSKWIKEPHFLHAIEYGNYVYFFFREIAVEHNNLGKAVYSRVARICKNDMGGSQRVLEKHRTSFLKARLNCSVPGDSFFYFDVLQSITDIIQINGIPTVVGVFTTQLNSIPGSAVCAFSMDDIEKVFKGRFKEQKTPDSVWTAVPEDKVPKPRPGCCAKHGLAEAYKTSIDFPDETLSFIKSHPLMDSAVPPIADEPWFTKTRVRYRLTAISVDHSAGPYQNYTVIFVGSEAGMVLKVLAKTSPFSLNDSVLLEEIEAYNHAK

SEQ ID NO: 223 - DNA, 1894 bp, Artificial Sequence
  Description of Artifical Sequence:  Primer/Probe
tggcatttctgagcaggggccaccctgacttcaccttggcccaccatgagggtcttcctgctttgtgcctacatactgctgctgatggtttcccagttgagggcagtcagctttcctgaagatgatgaaccccttaatactgtcgactatcactattcaaggcaatatccggtttttagaggacgcccttcaggcaatgaatcgcagcacaggctggactttcagctgatgttgaaaattcgagacacactttatattgctggcagggatcaagtttatacagtaaacttaaatgaaatgcccaaaacagaagtaatacccaacaagaaactgacatggcgatcaagacaacaggatcgagaaaactgtgctatgaaaggcaagcataaagatgaatgccacaactttatcaaagtatttgttccaagaaacgatgagatggtttttgtttgtggtaccaatgcattcaatcccatgtgtagatactacaggttgagtaccttagaatatgatggggaagaaattagtggcctggcaagatgcccatttgatgccagacaaaccaatgttgccctctttgctgatgggaagctgtattctgccacagtggctgacttcttggccagcgatgccgttatttatcgaagcatgggtgatggatctgcccttcgcacaataaaatatgattccaaatggataaaagagccacactttcttcatgccatagaatatggaaactatgtctatttcttctttcgagaaatcgctgtcgaacataataatttaggcaaggctgtgtattcccgcgtggcccgcatatgtaaaaacgacatgggtggttcccagcgggtcctggagaaacactggacttcatttctaaaggctcggctgaactgttctgtccctggagattcgtttttctactttgatgttctgcagtctattacagacataatacaaatcagtggcatccccactgtggtcggggtgtttaccacgcagctcaatagcatccctggttctgctgtctgtgcatttagcatggatgacattgaaaaagtattcaaaggacggtttaaggaacagaaaactccagattctgtttggacagcagttcccgaagacaaagtgccaaagccaaggcctggctgttgtgcaaaacacggccttgccgaagcttataaaacctccatcgatttcccggatgaaactctgtcattcatcaaatctcatcccctgatggactctgccgttccacccattgccgatgagccctggttcacaaagactcgggtcaggtacagactgacggccatctcagtggaccattcagccggaccctaccagaactacacagtcatctttgttggctctgaagctggcatggtacttaaagttctggcaaagaccagtcctttctctttgaacgacagcgtattactggaagagattgaagcctacaaccatgcaaagtaggtatatgttacgagaacgcccttcagcactgctcaaaaattttcggcatgtatttcatctagtcatgtccttttggtcctctaaattagcagtggtttggcataatagtgttttgtgttttttttctcattgaaataaatcttgggtttgtttttttcccgagcctgctagggcgaggggggtgaatggttgatgagtttaaaaataatgcagcccttgtttttcacctgtagaatatgagaacattttaacagcacctctcttatcttgcagatatattccaagatgctacatgcagcagacagctgtgagcttgcatacacacacacacaaatatacatgcacatacatacacagaatgtagtactagttaagtatttccttcctatctttaataagtaagagaatatttagacca

SEQ ID NO: 224 - protein, 476 aa, Artificial Sequence
  Description of Artifical Sequence:  Domain
MRVFLLCAYILLLMVSQLRAVSFPEDDEPLNTVDYHYSRQYPVFRGRPSGNESQHRLDFQLMLKIRDTLYIAGRDQVYTVNLNEMPKTEVIPNKKLTWRSRQQDRENCAMKGKHKDECHNFIKVFVPRNDEMVFVCGTNAFNPMCRYYRLSTLEYDGEEISGLARCPFDARQTNVALFADGKLYSATVADFLASDAVIYRSMGDGSALRTIKYDSKWIKEPHFLHAIEYGNYVYFFFREIAVEHNNLGKAVYSRVARICKNDMGGSQRVLEKHWTSFLKARLNCSVPGDSFFYFDVLQSITDIIQISGIPTVVGVFTTQLNSIPGSAVCAFSMDDIEKVFKGRFKEQKTPDSVWTAVPEDKVPKPRPGCCAKHGLAEAYKTSIDFPDETLSFIKSHPLMDSAVPPIADEPWFTKTRVRYRLTAISVDHSAGPYQNYTVIFVGSEAGMVLKVLAKTSPFSLNDSVLLEEIEAYNHAK

SEQ ID NO: 225 - DNA, 1894 bp, Artificial Sequence
  Description of Artifical Sequence:  Primer/Probe
tggcatttctgagcaggggccaccctgacttcaccttggcccaccatgagggtcttcctgctttgtgcctacatactgctgctgatggtttcccagttgagggcagtcagctttcctgaagatgatgaaccccttaatactgtcgactatcactattcaaggcaatatccggtttttagaggacgcccttcaggcaatgaatcgcagcacaggctggactttcagctgatgttgaaaattcgagacacactttatattgctggcagggatcaagtttatacagtaaacttaaatgaaatgcccaaaacagaagtaatacccaacaagaaactgacatggcgatcaagacaacaggatcgagaaaactgtgctatgaaaggcaagcataaagatgaatgccacaactttatcaaagtatttgttccaagaaacgatgagatggtttttgtttgtggtaccaatgcattcaatcccatgtgtagatactacaggttgagtaccttagaatatgatggggaagaaattagtggcctggcaagatgcccatttgatgccagacaaaccaatgttgccctctttgctgatgggaagctgtattctgccacagtggctgacttcttggccagcgatgccgttatttatcgaagcatgggtgatggatctgcccttcgcacaataaaatatgattccaaatggataaaagagccacactttcttcatgccatagaatatggaaactatgtctatttcttctttcgagaaatcgctgtcgaacataataatttaggcaaggctgtgtattcccgcgtggcccgcatatgtaaaaacgacatgggtggttcccagcgggtcctggagaaacactggacttcatttctaaaggctcggctgaactgttctgtccctggagattcgtttttctactttgatgttctgcagtctattacagacataatacaaatcaatggcatccccactgtggtcggggtgtttaccacgcagctcaatagcatccctggttctgctgtctgtgcatttagcatggatgacattgaaaaagtattcaaaggacggtttaaggaacagaaaactccagattctgtttggacagcagttcccgaagacaaagtgccaaagccaaggcctggctgttgtgcaaaacacggccttgccgaagcttataaaacctccatcgatttcccggatgaaactctgtcattcatcaaatctcatcccctgatggactctgccgttccacccattgccgatgagccctggttcacaaagactcgggtcaggtacagactgacggccatctcagtggaccattcagccggaccctaccagaaccacacagtcatctttgttggctctgaagctggcatggtacttaaagttctggcaaagaccagtcctttctctttgaacgacagcgtattactggaagagattgaagcctacaaccatgcaaagtaggtatatgttacgagaacgcccttcagcactgctcaaaaattttcggcatgtatttcatctagtcatgtccttttggtcctctaaattagcagtggtttggcataatagtgttttgtgttttttttctcattgaaataaatcttgggtttgtttttttcccgagcctgctagggcgaggggggtgaatggttgatgagtttaaaaataatgcagcccttgtttttcacctgtagaatatgagaacattttaacagcacctctcttatcttgcagatatattccaagatgctacatgcagcagacagctgtgagcttgcatacacacacacacaaatatacatgcacatacatacacagaatgtagtactagttaagtatttccttcctatctttaataagtaagagaatatttagacca

SEQ ID NO: 226 - protein, 476 aa, Artificial Sequence
  Description of Artifical Sequence:  Domain
MRVFLLCAYILLLMVSQLRAVSFPEDDEPLNTVDYHYSRQYPVFRGRPSGNESQHRLDFQLMLKIRDTLYIAGRDQVYTVNLNEMPKTEVIPNKKLTWRSRQQDRENCAMKGKHKDECHNFIKVFVPRNDEMVFVCGTNAFNPMCRYYRLSTLEYDGEEISGLARCPFDARQTNVALFADGKLYSATVADFLASDAVIYRSMGDGSALRTIKYDSKWIKEPHFLHAIEYGNYVYFFFREIAVEHNNLGKAVYSRVARICKNDMGGSQRVLEKHWTSFLKARLNCSVPGDSFFYFDVLQSITDIIQINGIPTVVGVFTTQLNSIPGSAVCAFSMDDIEKVFKGRFKEQKTPDSVWTAVPEDKVPKPRPGCCAKHGLAEAYKTSIDFPDETLSFIKSHPLMDSAVPPIADEPWFTKTRVRYRLTAISVDHSAGPYQNHTVIFVGSEAGMVLKVLAKTSPFSLNDSVLLEEIEAYNHAK

SEQ ID NO: 227 - DNA, 1894 bp, Artificial Sequence
  Description of Artifical Sequence:  Primer/Probe
tggcatttctgagcaggggccaccctgacttcaccttggcccaccatgagggtcttcctgctttgtgcctacatactgctgctgatggtttcccagttgagggcagtcagctttcctgaagatgatgaaccccttaatactgtcgactatcactattcaaggcaatatccggtttttagaggacgcccttcaggcaatgaatcgcagcacaggctggactttcagctgatgttgaaaattcgagacacactttatattgctggcagggatcaagtttatacagtaaacttaaatgaaatgcccaaaacagaagtaatacccaacaagaaactgacatggcgatcaagacaacaggatcgagaaaactgtgctatgaaaggcaagcataaagatgaatgccacaactttatcaaagtatttgttccaagaaacgatgagatggtttttgtttgtggtaccaatgcattcaatcccatgtgtagatactacaggttgagtaccttagaatatgatggggaagaaattagtggcctggcaagatgcccatttgatgccagacaaaccaatgttgccctctttgctgatgggaagctgtattctgccacagtggctgacttcttggccagcgatgccgttatttatcgaagcatgggtgatggatctgcccttcgcacaataaaatatgattccaaatggataaaagagccacactttcttcatgccatagaatatggaaactatgtctatttcttctttcgagaaatcgctgtcgaacataataatttaggcaaggctgtgtattcccgcgtggcccgcatatgtaaaaacgacatgggtggttcccagcgggtcctggagaaacactggacttcatttctaaaggctcggctgaactgttctgtccctggagattcgtttttctactttgatgttctgcagtctattacagacataatacaaatcaatggcatccccactgtggtcggggtgtttaccacgcagctcaatagcatccctggttctgctgtctgtgcatttagcatggatgacattgaaaaagtattcaaaggacggtttaaggaacagaaaactccagattctgtttggacagcagttcccgaagacaaagtgccaaagccaaggcctggctgttgtgcaaaacacggccttgccgaagcttataaaacctccatcgatttcccggatgaaactctgtcattcatcaaatctcatcccctgatggactctgccgttccacccattgccgatgagccctggttcacaaagactcgggtcaggtacagactgacggccatctcagtggaccattcagccggaccctaccagaactacacagtcatctttgttggctctgaagctggcatggtacttaaagttctggcaaagaccagtcctttctctttgaacgacagcgtattactggaagagattgaagcctacaaccatgcaaagtaggtatatgttacgagaacgcccttcagcactgctcaaaaattttcggcatgtatttcatctagtcatgtccttttggtcctctaaattagcagtggtttggcataatagtgttttgtgttttttttctcattgaaataaatcttgggtttgtttttttcccgagcctgctagggcgaggggggtgaatggttgatgagtttaaaaataatgcagcccttgtttttcacctgtagaatatgagaacattttaacagcacctctcttatcttgcagatatattccaagatgctacatgcagcagacagctgtgagcttgcatacacacacacacaaatatacatgcacatacatacacagaatgcagtactagttaagtatttccttcctatctttaataagtaagagaatatttagacca

SEQ ID NO: 228 - protein, 476 aa, Artificial Sequence; identical to SEQ ID NO: 196
  Description of Artifical Sequence:  Domain

SEQ ID NO: 229 - DNA, 954 bp, Artificial Sequence
  Description of Artifical Sequence:  Primer/Probe
ggatcccaggacacctgcaggcaagggcaccctgggatccctgggaaccccggtcacaatggtctgcctggaagagatggacgagacggagcgaagggtgacaaaggcgatgcaggagaaccaggacgtcctggcagcccggggaaggatgggacgagtggagagaagggagaacgaggagcagatggaaaagttgaagcaaaaggcatcaaaggtgatcaaggctcaagaggatccccaggaaaacatggccccaaggggcttgcagggcccatgggagagaaaggcctccgaggagagactgggcctcaggggcagaaggggaataagggtgacgtgggtcccactggtcctgaggggccaaggggcaacattgggcctttgggcccaactggtttaccgggccccatgggccctattggaaagcctggtcccaagggagaagctggacccacggggccccagggtgagccaggagtccggggaataagaggctggaaaggagatcgaggagagaaagggaaaatcggtgagactctagtcttgccaaaaagtgctttcactgtggggctcacggtgctgagcaagtttccttcttcagatgtgcccattaaatttgataagatcctgtataacgaattcaaccattatgatacagcagcggggaaattcacgtgccacattgctggggtctattacttcacctaccacatcactgttttctccaggaatgttcaggtgtctttggtcaaaaatggagtaaaaatactgcacaccaaagatgcttacatgagctctgaggaccaggcctctggcggcattgtcctgcagctgaagctcggggatgaggtgtggctgcaggtgacaggaggagagaggttcaatggcttgtttgctgatgaggacgatgacacaactttcacagggttccttctgttcagcagcccgctcgag

SEQ ID NO: 230 - protein, 314 aa, Artificial Sequence
  Description of Artifical Sequence:  Domain
QDTCRQGHPGIPGNPGHNGLPGRDGRDGAKGDKGDAGEPGRPGSPGKDGTSGEKGERGADGKVEAKGIKGDQGSRGSPGKHGPKGLAGPMGEKGLRGETGPQGQKGNKGDVGPTGPEGPRGNIGPLGPTGLPGPMGPIGKPGPKGEAGPTGPQGEPGVRGIRGWKGDRGEKGKIGETLVLPKSAFTVGLTVLSKFPSSDVPIKFDKILYNEFNHYDTAAGKFTCHIAGVYYFTYHITVFSRNVQVSLVKNGVKILHTKDAYMSSEDQASGGIVLQLKLGDEVWLQVTGGERFNGLFADEDDDTTFTGFLLFSSP

SEQ ID NO: 231 - DNA, 1026 bp, Artificial Sequence
  Description of Artifical Sequence:  Primer/Probe
tctgtcatctgaaccatgaggatctggtggtttctgcttgccattgaaatctgcacagggaacataaactcacaggacacctgcaggcaagggcaccctggcatccctgggaaccccggtcacaatggtctgtctggaagagatggacgagacggagcgaagggtgacaaaggcgatgcaggagaaccaggacgtcctggcagcccggggaaggatgggacgagtggagagaagggagaacgaggagcagatggaaaagttgaagcaaaaggcatcaaaggtgatcaaggctcaagaggatccccaggaaaacatggccccaaggggcttgcagggcccatgggagagaagggcctccgaggagagactgggcctcaggggcagaaggggaataagggtgacgtgggtcccactggtcctgaggggccaaggggcaacattgggcctttgggcccaactggtttaccgggccccatgggccctattggaaagcctggtcccaaaggagaagctggacccacggggccccagggtgagccaggagtccggggaataagaggctggaaaggagatcgaggagagaaagggaaaatcggtgagactctagtcttgccaaaaagtgctttcactgtggggctcacggtgctgagcaagtttccttcttcagatatgcccattaaatttgataagatcctgtataacgaattcaaccattatgatacagcagcggggaaattcacgtgccacattgctggggtctattacttcacctaccacatcactgttttctccaggaatgttcaggtgtctttggtcaaaaatggagtaaaaatactgcacaccaaagatgcttacatgagctctgaggaccaggcctctggcggcattgtcctgcagctgaagctcggggatgaggtgtggctgcaggtgacaggaggagagaggttcaatggcttgtttgctgatgaggacgatgacacaactttcacagggttccttctgttcagcagccagtgacagaggaga

SEQ ID NO: 232 - protein, 333 aa, Artificial Sequence
  Description of Artifical Sequence:  Domain
MRIWWFLLAIEICTGNINSQDTCRQGHPGIPGNPGHNGLSGRDGRDGAKGDKGDAGEPGRPGSPGKDGTSGEKGERGADGKVEAKGIKGDQGSRGSPGKHGPKGLAGPMGEKGLRGETGPQGQKGNKGDVGPTGPEGPRGNIGPLGPTGLPGPMGPIGKPGPKGEAGPTGPQGEPGVRGIRGWKGDRGEKGKIGETLVLPKSAFTVGLTVLSKFPSSDMPIKFDKILYNEFNHYDTAAGKFTCHIAGVYYFTYHITVFSRNVQVSLVKNGVKILHTKDAYMSSEDQASGGIVLQLKLGDEVWLQVTGGERFNGLFADEDDDTTFTGFLLFSSQ

SEQ ID NO: 233 - DNA, 818 bp, Artificial Sequence
  Description of Artifical Sequence:  Primer/Probe
tccctctttcagttcagagtctgtcatctgaaccatgaggatctggtggcttctgcttgccattgaaatctgcacagggaacataaactcacaggacacctgcaggcaagggcaccctggaatccctgggaaccccggtcacaatggtctgcctggaagagatggacgagacggagcgaagggtgacaaaggcgatgcaggtaagcctggtcccaaaggagaagctggacccacggggccccagggtgagccaggagtccggggaataagaggctggaaaggagatcgaggagagaaagggaaaatcggtgagactctagtcttgccaaaaagtgctttcactgtggggctcacggtgctgagcaagtttccttcttcagatatgcccattaaatttgataagatcctgtataacgaattcaaccattatgatacagcagcggggaaattcacgtgccacattgctggggtctattacttcacctaccacatcactgttttctccagaaatgttcaggtgtctttggtcaaaaatggagtaaaaatactgcacaccaaagatgcttacatgagctctgaggaccaggcctctggcggcattgtcctgcagctgaagctcggggatgaggtgtggctgcaggtgacaggaggagagaggttcaatggcttgtttgctgatgaggacgatgacacaactttcacagggttccttctgttcagcagcccgtgacagaggagagtttaaaaatccgccacaccatccatcagaatcagcttgggatgaacttattcagatggttttactttattaattcctc

SEQ ID NO: 234 - protein, 231 aa, Artificial Sequence
  Description of Artifical Sequence:  Domain
MRIWWLLLAIEICTGNINSQDTCRQGHPGIPGNPGHNGLPGRDGRDGAKGDKGDAGKPGPKGEAGPTGPQGEPGVRGIRGWKGDRGEKGKIGETLVLPKSAFTVGLTVLSKFPSSDMPIKFDKILYNEFNHYDTAAGKFTCHIAGVYYFTYHITVFSRNVQVSLVKNGVKILHTKDAYMSSEDQASGGIVLQLKLGDEVWLQVTGGERFNGLFADEDDDTTFTGFLLFSSP

SEQ ID NO: 235 - DNA, 1024 bp, Artificial Sequence
  Description of Artifical Sequence:  Primer/Probe
caccggatccaccatgaggatctggtggtttctgcttgccattgaaatctgcacagggaacataaactctcaggacacctgcaggcaagggcaccctggaatccctgggaaccccggtcacaatggtctgcctggaagagatggacgagacggagcgaagggtgacaaaggcgatgcaggagaaccaggacgtcctggcagcccggggaaggatgggacgagtggagagaagggagaacgaggagcagatggaaaagttgaagcaaaaggcatcaaaggtgatcaaggctcaagaggatccccaggaaaacatggccccaaggggcttgcagggcccatgggagagaaaggcctccgaggagagactgggcctcaggggcagaaggggaataagggtgacgtgggtcccactggtcctgaggggccaaggggcaacattgggcctttgggcccaactggtttaccgggccccatgggccctattggaaagcctggtcccaagggagaagctggacccacggggccccagggtgagccaggagtccggggaataagaggctggaaaggagatcgaggagagaaagggaaaatcggtgagactctagtcttgccaaaaagtgctttcactgtggggctcacggtgctgagcaagtttccttcttcagatgtgcccattaaatttgataagatcctgtataacgaattcaaccattatgatacagcagcggggaaattcacgtgccacattgctggggtctattacttcacctaccacatcactgttttctccaggaatgttcaggtgtctttggtcaaaaatggagtaaaaatactgcacaccaaagatgcttacatgagctctgaggaccaggcctctggcggcattgtcctgcagctgaagctcggggatgaggtgtggctgcaggtgacaggaggagagaagttcaatggcttgtttgctgatgaggacgatgacacaactttcacagggttccttctgttcagcagcccgtgagtcgacggc

SEQ ID NO: 236 - protein, 337 aa, Artificial Sequence
  Description of Artifical Sequence:  Domain
TGSTMRIWWFLLAIEICTGNINSQDTCRQGHPGIPGNPGHNGLPGRDGRDGAKGDKGDAGEPGRPGSPGKDGTSGEKGERGADGKVEAKGIKGDQGSRGSPGKHGPKGLAGPMGEKGLRGETGPQGQKGNKGDVGPTGPEGPRGNIGPLGPTGLPGPMGPIGKPGPKGEAGPTGPQGEPGVRGIRGWKGDRGEKGKIGETLVLPKSAFTVGLTVLSKFPSSDVPIKFDKILYNEFNHYDTAAGKFTCHIAGVYYFTYHITVFSRNVQVSLVKNGVKILHTKDAYMSSEDQASGGIVLQLKLGDEVWLQVTGGEKFNGLFADEDDDTTFTGFLLFSSP

SEQ ID NO: 237 - DNA, 405 bp, Artificial Sequence
  Description of Artifical Sequence:  Primer/Probe
ggatccgctttcactgtggggctcacggtgctgagcaagtttccttcttcagatatgcccattaaatttgataagatcctgtataacgaattcaaccattatgatacagcagcggggaaattcacgtgccacattgctggggtctattacttcacctaccacatcactgttttctccaggaatgttcaggtgtctttggtcaaaaatggagtaaaaatactgcacaccaaagatgcttacatgagctctgaggaccaggcctctggcggcattgtcctgcagctgaagctcggggatgaggtgtggctgcaggtgacaggaggagagaggttcaatggcttgtttgctgatgaggacgatgacacaactttcacagggttccttctgttcagcagcccgctcgag

SEQ ID NO: 238 - protein, 131 aa, Artificial Sequence
  Description of Artifical Sequence:  Domain
AFTVGLTVLSKFPSSDMPIKFDKILYNEFNHYDTAAGKFTCHIAGVYYFTYHITVFSRNVQVSLVKNGVKILHTKDAYMSSEDQASGGIVLQLKLGDEVWLQVTGGERFNGLFADEDDDTTFTGFLLFSSP

SEQ ID NO: 239 - DNA, 1149 bp, Artificial Sequence
  Description of Artifical Sequence:  Primer/Probe
cagtatctgggtccagcctgcagccttagggtccaggtgatgttaccgtgtgtgtggcccttcttcacagtggcctcctagaaaaacaagaccctgactcaaagaacacctctcactacattcagagtctgtcatctgaaccatgaggatctggtggcttctgcttgccattgaaatctgcacagggaacataaactcacaggacacctgcaggcaagggcaccctggaatccctgggaaccccggtcacaatggtctgcctggaagagatggacgagacggagcgaagggtgacaaaggcgatgcaggagaaccaggacgtcctggcagcccggggaaggatgggacgagtggagagaagggagaacgaggagcagatggaaaagttgaagcaaaaggcatcaaaggtgatcaaggctcaagaggatccccaggaaaacatggccccaaggggcttgcagggcccatgggagagaaaggcctccgaggagagactgggcctcaggggcagaaggggaataagggtgacgtgggtcccactggtcctgaggggccaaggggcaacattgggcctttgggcccaactggtttaccgggccccatgggccctattggaaagcctggtcccaagggagaagctggacccacggggccccagggtgagccaggagtccggggaataagaggctggaaaggagatcgaggagagaaagggaaaatcggtgagactctagtcttgccaaaaagtgctttcactgtggggctcacggtgctgagcaagtttccttcttcagatgtgcccattaaatttgataagatccacatcactgttttctccaggaatgttcaggtgtctttggtcaaaaacggagtaaaaatactgcacaccagagatgcttacgtgagctctgaggaccaggcctctggcagcattgtcctgcagctgaagctcggggatgagatgtggctgcaggtgacaggaggagagaggttcaatggcttgtttgctgatgaggacgatgacacaactttcacagggttccttctgttcagcagccagtgacagaggagagtttataaatctgccagaccatccatcagaatcagcttgggatgaacttattcagatggttttactttattaattca

SEQ ID NO: 240 - protein, 306 aa, Artificial Sequence
  Description of Artifical Sequence:  Domain
MRIWWLLLAIEICTGNINSQDTCRQGHPGIPGNPGHNGLPGRDGRDGAKGDKGDAGEPGRPGSPGKDGTSGEKGERGADGKVEAKGIKGDQGSRGSPGKHGPKGLAGPMGEKGLRGETGPQGQKGNKGDVGPTGPEGPRGNIGPLGPTGLPGPMGPIGKPGPKGEAGPTGPQGEPGVRGIRGWKGDRGEKGKIGETLVLPKSAFTVGLTVLSKFPSSDVPIKFDKIHITVFSRNVQVSLVKNGVKILHTRDAYVSSEDQASGSIVLQLKLGDEMWLQVTGGERFNGLFADEDDDTTFTGFLLFSSQ

SEQ ID NO: 241 - DNA, 889 bp, Artificial Sequence
  Description of Artifical Sequence:  Primer/Probe
tctgtcatctgaaccatgaggatctggtggtttctgcttgccattgaaatctgcacagggaacataaactcacaggacacctgcaggcaagggcaccctggcatccctgggaaccccggtcacaatggtctgtctggaagagatggacgagacggagcgaagggtgacaaaggcgatgcaggagaaccaggacgtcctggcagcccggggaaggatgggacgagtggagagaagggagaacgaggagcagatggaaaagttgaagcaaaaggcatcaaaggtgatcaaggctcaagaggatccccaggaaaacatggccccaaggggcttgcagggcccatgggagagaaaggcctccgaggagagactgggcctcaggggcagaaggggaataagggtgagccaggagtccggggaataagaggctggaaaggagatcgaggagagaaagggaaaatcggtgagactctagtcttgccaaaaagtgctttcactgtggggctcacggtgctgagcaagtttccttcttcagatgtgcccattaaatttgataagatcctgtataacgaattcaaccattatgatacagcagcggggaaattcacgtgccacattgctggggtctattacttcacctaccacatcgctgttttctccagcaatgttcaggtgtctttggtcaaaaatggagtaaaaatactgcacaccaaagatgcttacatgagctctgaggaccaggcctctggcggcattgtcctgcagctgaagctcggggatgaggtgtggctgcaggtgacaggaggagagaggttcaatggcttgtttgctgatgaggacgatgacacaactttcacagggttccttctgttcagcagccagtgacagagga

SEQ ID NO: 242 - protein, 288 aa, Artificial Sequence
  Description of Artifical Sequence:  Domain
MRIWWFLLAIEICTGNINSQDTCRQGHPGIPGNPGHNGLSGRDGRDGAKGDKGDAGEPGRPGSPGKDGTSGEKGERGADGKVEAKGIKGDQGSRGSPGKHGPKGLAGPMGEKGLRGETGPQGQKGNKGEPGVRGIRGWKGDRGEKGKIGETLVLPKSAFTVGLTVLSKFPSSDVPIKFDKILYNEFNHYDTAAGKFTCHIAGVYYFTYHIAVFSSNVQVSLVKNGVKILHTKDAYMSSEDQASGGIVLQLKLGDEVWLQVTGGERFNGLFADEDDDTTFTGFLLFSSQ

SEQ ID NO: 243 - DNA, 961 bp, Artificial Sequence
  Description of Artifical Sequence:  Primer/Probe
caccagatctcaggacacctgcaggcaagggcaccctgggatccctgggaaccccggtcacaatggtctgcctggaagagatggacgagacggagcgaagggtgacaaaggcgatgcaggagaaccaggacgtcctggcagcccggggaaggatgggacgagtggagagaagggagaacgaggagcagatggaaaagttgaagcaaaaggcatcaaaggtgatcaaggctcaagaggatccccaggaaaacatggccccaaggggcttgcagggcccatgggagagaaaggcctccgaggagagactgggcctcaggggcagaaggggaataagggtgacgtgggtcccactggtcctgaggggccaaggggcaacattgggcctttgggcccaactggtttaccgggccccatgggccctattggaaagcctggtcccaagggagaagctggacccacggggccccagggtgagccaggagtccggggaataagaggctggaaaggagatcgaggagagaaagggaaaatcggtgagactctagtcttgccaaaaagtgctttcactgtggggctcacggtgctgagcaagtttccttcttcagatgtgcccattaaatttgataagatcctgtataacgaattcaaccattatgatacagcagcggggaaattcacgtgccacattgctggggtctattacttcacctaccacatcactgttttctccaggaatgttcaggtgtctttggtcaaaaatggagtaaaaatactgcacaccaaagatgcttacatgagctctgaggaccaggcctctggcggcattgtcctgcagctgaagctcggggatgaggtgtggctgcaggtgacaggaggagagaggttcaatggcttgtttgctgatgaggacgatgacacaactttcacagggttccttctgttcagcagcccggtcgacggc

SEQ ID NO: 244 - protein, 314 aa, Artificial Sequence; identical to SEQ ID NO: 230
  Description of Artifical Sequence:  Domain

SEQ ID NO: 245 - DNA, 1024 bp, Artificial Sequence; identical to SEQ ID NO: 235
  Description of Artifical Sequence:  Primer/Probe

SEQ ID NO: 246 - protein, 333 aa, Artificial Sequence
  Description of Artifical Sequence:  Domain
MRIWWFLLAIEICTGNINSQDTCRQGHPGIPGNPGHNGLPGRDGRDGAKGDKGDAGEPGRPGSPGKDGTSGEKGERGADGKVEAKGIKGDQGSRGSPGKHGPKGLAGPMGEKGLRGETGPQGQKGNKGDVGPTGPEGPRGNIGPLGPTGLPGPMGPIGKPGPKGEAGPTGPQGEPGVRGIRGWKGDRGEKGKIGETLVLPKSAFTVGLTVLSKFPSSDVPIKFDKILYNEFNHYDTAAGKFTCHIAGVYYFTYHITVFSRNVQVSLVKNGVKILHTKDAYMSSEDQASGGIVLQLKLGDEVWLQVTGGEKFNGLFADEDDDTTFTGFLLFSSP

SEQ ID NO: 247 - DNA, 964 bp, Artificial Sequence
  Description of Artifical Sequence:  Primer/Probe
caccagatctcaggacacctgcaggcaagggcaccctgggatccctgggaaccccggtcacaatggtctgcctggaagagatggacgagacggagcgaagggtgacaaaggcgatgcaggagaaccaggacgtcctggcagcccggggaaggatgggacgagtggagagaagggagaacgaggagcagatggaaaagttgaagcaaaaggcatcaaaggtgatcaaggctcaagaggatccccaggaaaacatggccccaaggggcttgcagggcccatgggagagaaaggcctccgaggagagactgggcctcaggggcagaaggggaataagggtgacgtgggtcccactggtcctgaggggccaaggggcaacattgggcctttgggcccaactggtttaccgggccccatgggccctattggaaagcctggtcccaagggagaagctggacccacggggccccagggtgagccaggagtccggggaataagaggctggaaaggagatcgaggagagaaagggaaaatcggtgagactctagtcttgccaaaaagtgctttcactgtggggctcacggtgctgagcaagtttccttcttcagatgtgcccattaaatttgataagatcctgtataacgaattcaaccattatgatacagcagcggggaaattcacgtgccacattgctggggtctattacttcacctaccacatcactgttttctccaggaatgttcaggtgtctttggtcaaaaatggagtaaaaatactgcacaccaaagatgcttacatgagctctgaggaccaggcctctggcggcattgtcctgcagctgaagctcggggatgaggtgtggctgcaggtgacaggaggagagaggttcaatggcttgtttgctgatgaggacgatgacacaactttcacagggttccttctgttcagcagcccgtaggtcgacggc

SEQ ID NO: 248 - protein, 314 aa, Artificial Sequence; identical to SEQ ID NO: 230
  Description of Artifical Sequence:  Domain

SEQ ID NO: 249 - DNA, 1024 bp, Artificial Sequence
  Description of Artifical Sequence:  Primer/Probe
caccagatctcccaccatgaggatctggtggtttctgcttgccattgaaatctgcacagggaacataaactctcaggacacctgcaggcaagggcaccctggaatccctgggaaccccggtcacaatggtctgcctggaagagatggacgagacggagcgaagggtgacaaaggcgatgcaggagaaccaggacgtcctggcagcccggggaaggatgggacgagtggagagaagggagaacgaggagcagatggaaaagttgaagcaaaaggcatcaaaggtgatcaaggctcaagaggatccccaggaaaacatggccccaaggggcttgcagggcccatgggagagaaaggcctccgaggagagactgggcctcaggggcagaaggggaataagggtgacgtgggtcccactggtcctgaggggccaaggggcaacattgggcctttgggcccaactggtttaccgggccccatgggccctattggaaagcctggtcccaagggagaagctggacccacggggccccagggtgagccaggagtccggggaataagaggctggaaaggagatcgaggagagaaagggaaaatcggtgagactctagtcttgccaaaaagtgctttcactgtggggctcacggtgctgagcaagtttccttcttcagatgtgcccattaaatttgataagatcctgtataacgaattcaaccattatgatacagcagcggggaaattcacgtgccacattgctggggtctattacttcacctaccacatcactgttttctccaggaatgttcaggtgtctttggtcaaaaatggagtaaaaatactgcacaccaaagatgcttacatgagctctgaggaccaggcctctggcggcattgtcctgcagctgaagctcggggatgaggtgtggctgcaggtgacaggaggagagaagttcaatggcttgtttgctgatgaggacgatgacacaactttcacagggttccttctgttcagcagcccgctcgagggc

SEQ ID NO: 250 - protein, 333 aa, Artificial Sequence; identical to SEQ ID NO: 246
  Description of Artifical Sequence:  Domain

SEQ ID NO: 251 - DNA, 1045 bp, Artificial Sequence
  Description of Artifical Sequence:  Primer/Probe
caccagatctaccatgggccaccatcaccaccatcacaggatctggtggtttctgcttgccattgaaatctgcacagggaacataaactctcaggacacctgcaggcaagggcaccctggaatccctgggaaccccggtcacaatggtctgcctggaagagatggacgagacggagcgaagggtgacaaaggcgatgcaggagaaccaggacgtcctggcagcccggggaaggatgggacgagtggagagaagggagaacgaggagcagatggaaaagttgaagcaaaaggcatcaaaggtgatcaaggctcaagaggatccccaggaaaacatggccccaaggggcttgcagggcccatgggagagaaaggcctccgaggagagactgggcctcaggggcagaaggggaataagggtgacgtgggtcccactggtcctgaggggccaaggggcaacattgggcctttgggcccaactggtttaccgggccccatgggccctattggaaagcctggtcccaagggagaagctggacccacggggccccagggtgagccaggagtccggggaataagaggctggaaaggagatcgaggagagaaagggaaaatcggtgagactctagtcttgccaaaaagtgctttcactgtggggctcacggtgctgagcaagtttccttcttcagatgtgcccattaaatttgataagatcctgtataacgaattcaaccattatgatacagcagcggggaaattcacgtgccacattgctggggtctattacttcacctaccacatcactgttttctccaggaatgttcaggtgtctttggtcaaaaatggagtaaaaatactgcacaccaaagatgcttacatgagctctgaggaccaggcctctggcggcattgtcctgcagctgaagctcggggatgaggtgtggctgcaggtgacaggaggagagaagttcaatggcttgtttgctgatgaggacgatgacacaactttcacagggttccttctgttcagcagcccgtaactcgagggc

SEQ ID NO: 252 - protein, 340 aa, Artificial Sequence
  Description of Artifical Sequence:  Domain
MGHHHHHHRIWWFLLAIEICTGNINSQDTCRQGHPGIPGNPGHNGLPGRDGRDGAKGDKGDAGEPGRPGSPGKDGTSGEKGERGADGKVEAKGIKGDQGSRGSPGKHGPKGLAGPMGEKGLRGETGPQGQKGNKGDVGPTGPEGPRGNIGPLGPTGLPGPMGPIGKPGPKGEAGPTGPQGEPGVRGIRGWKGDRGEKGKIGETLVLPKSAFTVGLTVLSKFPSSDVPIKFDKILYNEFNHYDTAAGKFTCHIAGVYYFTYHITVFSRNVQVSLVKNGVKILHTKDAYMSSEDQASGGIVLQLKLGDEVWLQVTGGEKFNGLFADEDDDTTFTGFLLFSSP

SEQ ID NO: 253 - DNA, 982 bp, Artificial Sequence
  Description of Artifical Sequence:  Primer/Probe
caccagatctcaccatcaccaccatcaccaggacacctgcaggcaagggcaccctggaatccctgggaaccccggtcacaatggtctgcctggaagagatggacgagacggagcgaagggtgacaaaggcgatgcaggagaaccaggacgtcctggcagcccggggaaggatgggacgagtggagagaagggagaacgaggagcagatggaaaagttgaagcaaaaggcatcaaaggtgatcaaggctcaagaggatccccaggaaaacatggccccaaggggcttgcagggcccatgggagagaaaggcctccgaggagagactgggcctcaggggcagaaggggaataagggtgacgtgggtcccactggtcctgaggggccaaggggcaacattgggcctttgggcccaactggtttaccgggccccatgggccctattggaaagcctggtcccaagggagaagctggacccacggggccccagggtgagccaggagtccggggaataagaggctggaaaggagatcgaggagagaaagggaaaatcggtgagactctagtcttgccaaaaagtgctttcactgtggggctcacggtgctgagcaagtttccttcttcagatgtgcccattaaatttgataagatcctgtataacgaattcaaccattatgatacagcagcggggaaattcacgtgccacattgctggggtctattacttcacctaccacatcactgttttctccaggaatgttcaggtgtctttggtcaaaaatggagtaaaaatactgcacaccaaagatgcttacatgagctctgaggaccaggcctctggcggcattgtcctgcagctgaagctcggggatgaggtgtggctgcaggtgacaggaggagagaagttcaatggcttgtttgctgatgaggacgatgacacaactttcacagggttccttctgttcagcagcccgtaactcgagggc

SEQ ID NO: 254 - protein, 320 aa, Artificial Sequence
  Description of Artifical Sequence:  Domain
HHHHHHQDTCRQGHPGIPGNPGHNGLPGRDGRDGAKGDKGDAGEPGRPGSPGKDGTSGEKGERGADGKVEAKGIKGDQGSRGSPGKHGPKGLAGPMGEKGLRGETGPQGQKGNKGDVGPTGPEGPRGNIGPLGPTGLPGPMGPIGKPGPKGEAGPTGPQGEPGVRGIRGWKGDRGEKGKIGETLVLPKSAFTVGLTVLSKFPSSDVPIKFDKILYNEFNHYDTAAGKFTCHIAGVYYFTYHITVFSRNVQVSLVKNGVKILHTKDAYMSSEDQASGGIVLQLKLGDEVWLQVTGGEKFNGLFADEDDDTTFTGFLLFSSP

SEQ ID NO: 255 - DNA, 982 bp, Artificial Sequence
  Description of Artifical Sequence:  Primer/Probe
caccagatctcaccatcaccaccatcaccaggacacctgcaggcaagggcaccctggaatccctgggaaccccggtcacaatggtctgcctggaagagatggacgagacggagcgaagggtgacaaaggcgatgcaggagaaccaggacgtcctggcagcccggggaaggatgggacgagtggagagaagggagaacgaggagcagatggaaaagttgaagcaaaaggcatcaaaggtgatcaaggctcaagaggatccccaggaaaacatggccccaaggggcttgcagggcccatgggagagaaaggcctccgaggagagactgggcctcaggggcagaaggggaataagggtgacgtgggtcccactggtcctgaggggccaaggggcaacattgggcctttgggcccaactggtttaccgggccccatgggccctattggaaagcctggtcccaagggagaagctggacccacggggccccagggtgagccaggagtccggggaataagaggctggaaaggagatcgaggagagaaagggaaaatcggtgagactctagtcttgccaaaaagtgctttcactgtggggctcacggtgctgagcaagtttccttcttcagatgtgcccattaaatttgataagatcctgtataacgaattcaaccattatgatacagcagcggggaaattcacgtgccacattgctggggtctattacttcacctaccacatcactgttttctccaggaatgttcaggtgtctttggtcaaaaatggagtaaaaatactgcacaccaaagatgcttacatgagctctgaggaccaggcctctggcggcattgtcctgcagctgaagctcggggatgaggtgtggctgcaggtgacaggaggagagaggttcaatggcttgtttgctgatgaggacgatgacacaactttcacagggttccttctgttcagcagcccgtaactcgagggc

SEQ ID NO: 256 - protein, 320 aa, Artificial Sequence
  Description of Artifical Sequence:  Domain
HHHHHHQDTCRQGHPGIPGNPGHNGLPGRDGRDGAKGDKGDAGEPGRPGSPGKDGTSGEKGERGADGKVEAKGIKGDQGSRGSPGKHGPKGLAGPMGEKGLRGETGPQGQKGNKGDVGPTGPEGPRGNIGPLGPTGLPGPMGPIGKPGPKGEAGPTGPQGEPGVRGIRGWKGDRGEKGKIGETLVLPKSAFTVGLTVLSKFPSSDVPIKFDKILYNEFNHYDTAAGKFTCHIAGVYYFTYHITVFSRNVQVSLVKNGVKILHTKDAYMSSEDQASGGIVLQLKLGDEVWLQVTGGERFNGLFADEDDDTTFTGFLLFSSP

SEQ ID NO: 257 - DNA, 818 bp, Artificial Sequence
  Description of Artifical Sequence:  Primer/Probe
tccctctttcagttcagagtctgtcatctgaaccatgaggatctggtggtttctgcttgccattgaaatctgcacagggaacataaactcacaggacacctgcaggcaagggcaccctggaatccctgggaaccccggtcacaatggtctgcctggaagagatggacgagacggagcgaagggtgacaaaggcgatgcaggtaagcctggtcccaaaggagaagctggacccacggggccccagggtgagccaggagtccggggaataagaggctggaaaggagatcgaggagagaaagggaaaatcggtgagactctagtcttgccaaaaagtgctttcactgtggggctcacggtgctgagcaagtttccttcttcagatatgcccattaaatttgataagatcctgtataacgaattcaaccattatgatacagcagcggggaaattcacgtgccacattgctggggtctattacttcacctaccacatcactgttttctccagaaatgttcaggtgtctttggtcaaaaatggagtaaaaatactgcacaccaaagatgcttacatgagctctgaggaccaggcctctggcggcattgtcctgcagctgaagctcggggatgaggtgtggctgcaggtgacaggaggagagaggttcaatggcttgtttgctgatgaggacgatgacacaactttcacagggttccttctgttcagcagcccgtgacagaggagagtttaaaaatccgccacaccatccatcagaatcagcttgggatgaacttattcagatggttttactttattaattcctc

SEQ ID NO: 258 - protein, 231 aa, Artificial Sequence
  Description of Artifical Sequence:  Domain
MRIWWFLLAIEICTGNINSQDTCRQGHPGIPGNPGHNGLPGRDGRDGAKGDKGDAGKPGPKGEAGPTGPQGEPGVRGIRGWKGDRGEKGKIGETLVLPKSAFTVGLTVLSKFPSSDMPIKFDKILYNEFNHYDTAAGKFTCHIAGVYYFTYHITVFSRNVQVSLVKNGVKILHTKDAYMSSEDQASGGIVLQLKLGDEVWLQVTGGERFNGLFADEDDDTTFTGFLLFSSP

SEQ ID NO: 259 - DNA, 818 bp, Artificial Sequence
  Description of Artifical Sequence:  Primer/Probe
tccctctttcagttcagagtctgtcatctgaaccatgaggatctggtggcttctgcttgccattgaaatctgcacagggaacataaactcacaggacacctgcaggcaagggcaccctggaatccctgggaaccccggtcacaatggtctgcctggaagagatggacgagacggagcgaagggtgacaaaggcgatgcaggtaagcctggtcccaaaggagaagctggacccacagggccccagggtgagccaggagtccggggaataagaggctggaaaggagatcgaggagagaaagggaaaatcggtgagactctagtcttgccaaaaagtgctttcactgtggggctcacggtgctgagcaagtttccttcttcagatatgcccattaaatttgataagatcctgtataacgaattcaaccattatgatacagcagcggggaaattcacgtgccacattgctggggtctattacttcacctaccacatcactgttttctccagaaatgttcaggtgtctttggtcaaaaatggagtaaaaatactgcacaccaaagatgcttacatgagctctgaggaccaggcctctggcggcattgtcctgcagctgaagctcggggatgaggtgtggctgcaggtgacaggaggagagaggttcaatggcttgtttgctgatgaggacgatgacacaactttcacagggttccttctgttcagcagcccgtgacagaggagagtttaaaaatccgccacaccatccatcagaatcagcttgggatgaacttattcagatggttttactttattaattcctc

SEQ ID NO: 260 - protein, 231 aa, Artificial Sequence; identical to SEQ ID NO: 234
  Description of Artifical Sequence:  Domain

SEQ ID NO: 261 - DNA, 818 bp, Artificial Sequence
  Description of Artifical Sequence:  Primer/Probe
tccctctttcagttcagagtctgtcatctgaaccatgaggatctggtggcttctgcttgccattgaaatctgcacagggaacataaactcacaggacacctgcaggcaagggcaccctggaatccctgggaaccccggtcacaatggtctgcctggaagagatggacgagacggagcgaagggtgacaaaggcgatgcaggtaagcctggtcccaaaggagaagctggacccacggggccccagggtgagccaggagtccggggaataagaggctggaaaggagatcgaggagagaaagggaaaatcggtgagactctagtcttgccaaaaagtgctttcactgtggggctcacggtgctgagcaagtttccttcttcagatgtgcccattaaatttgataagatcctgtataacgaattcaaccattatgatacagcagcggggaaattcacgtgccacattgctggggtctattacttcacctaccacatcactgttttctccagaaatgttcaggtgtctttggtcaaaaatggagtaaaaatactgcacaccaaagatgcttacatgagctctgaggaccaggcctctggcggcattgtcctgcagctgaagctcggggatgaggtgtggctgcaggtgacaggaggagagaggttcaatggcttgtttgctgatgaggacgatgacacaactttcacagggttccttctgttcagcagcccgtgacagaggagagtttaaaaatccgccacaccatccatcagaatcagcttgggatgaacttattcagatggttttactttattaattcctc

SEQ ID NO: 262 - protein, 231 aa, Artificial Sequence
  Description of Artifical Sequence:  Domain
MRIWWLLLAIEICTGNINSQDTCRQGHPGIPGNPGHNGLPGRDGRDGAKGDKGDAGKPGPKGEAGPTGPQGEPGVRGIRGWKGDRGEKGKIGETLVLPKSAFTVGLTVLSKFPSSDVPIKFDKILYNEFNHYDTAAGKFTCHIAGVYYFTYHITVFSRNVQVSLVKNGVKILHTKDAYMSSEDQASGGIVLQLKLGDEVWLQVTGGERFNGLFADEDDDTTFTGFLLFSSP

SEQ ID NO: 263 - DNA, 818 bp, Artificial Sequence
  Description of Artifical Sequence:  Primer/Probe
tccctctttcagttcagagtctgtcatctgaaccatgaggatctggtggcttctgcttgccattgaaatctgcacagggaacataaactcacaggacacctgcaggcaagggcaccctggaatccctgggaaccccggtcacaatggtctgcctggaagagatggacgagacggagcgaagggtgacaaaggcgatgcaggtaagcctggtcccaaaggagaagctggacccacggggccccagggtgagccaggagtccggggaataagaggctggaaaggagatcgaggagagaaagggaaaatcggtgagactctagtcttgccaaaaagtgctttcactgtggggctcacggtgctgagcaagtttccttcttcagatatgcccattaaatttgataagatcctgtataacgaattcaaccattatgatacagcagcggggaaattcacgtgccacattgctggggtctattacttcacctaccacatcactgttttctccagaaatgttcaggtgtctttggtcaaaaatggagtaaaaatactgcacaccaaagatgcttacatgagctctgaggaccaggcctctggcggcattgtcctgcagctgaagctcggggatgaggtgtggctgcaggtgacaggaagagagaggttcaatggcttgtttgctgatgaggacgatgacacaactttcacagggttccttctgttcagcagcccgtgacagaggagagtttaaaaatccgccacaccatccatcagaatcagcttgggatgaacttattcagatggttttactttattaattcctc

SEQ ID NO: 264 - protein, 231 aa, Artificial Sequence
  Description of Artifical Sequence:  Domain
MRIWWLLLAIEICTGNINSQDTCRQGHPGIPGNPGHNGLPGRDGRDGAKGDKGDAGKPGPKGEAGPTGPQGEPGVRGIRGWKGDRGEKGKIGETLVLPKSAFTVGLTVLSKFPSSDMPIKFDKILYNEFNHYDTAAGKFTCHIAGVYYFTYHITVFSRNVQVSLVKNGVKILHTKDAYMSSEDQASGGIVLQLKLGDEVWLQVTGRERFNGLFADEDDDTTFTGFLLFSSP

SEQ ID NO: 265 - DNA, 818 bp, Artificial Sequence
  Description of Artifical Sequence:  Primer/Probe
tccctctttcagttcagagtctgtcatctgaaccatgaggatctggtggcttctgcttgccattgaaatctgcacagggaacataaactcacaggacacctgcaggcaagggcaccctggaatccctgggaaccccggtcacaatggtctgcctggaagagatggacgagacggagcgaagggtgacaaaggcgatgcaggtaagcctggtcccaaaggagaagctggacccacggggccccagggtgagccaggagtccggggaataagaggctggaaaggagatcgaggagagaaagggaaaatcggtgagactctagtcttgccaaaaagtgctttcactgtggggctcacggtgctgagcaagtttccttcttcagatatgcccattaaatttgataagatcctgtataacgaattcaaccattatgatacagcagcggggaaattcacgtgccacattgctggggtctattacttcacctaccacatcactgttttctccagaaatgttcaggtgtctttggtcaaaaatggagtaaaaatactgcacaccaaagatgcttacatgagctctgaggaccaggcctctggcggcattgtcctgcagctgaagctcggggatgaggtgtggctgcaggtgacaggaggagagaggttcaatggcttgtttgctgatgaggacggtgacacaactttcacagggttccttctgttcagcagcccgtgacagaggagagtttaaaaatccgccacaccatccatcagaatcagcttgggatgaacttattcagatggttttactttattaattcctc

SEQ ID NO: 266 - protein, 231 aa, Artificial Sequence
  Description of Artifical Sequence:  Domain
MRIWWLLLAIEICTGNINSQDTCRQGHPGIPGNPGHNGLPGRDGRDGAKGDKGDAGKPGPKGEAGPTGPQGEPGVRGIRGWKGDRGEKGKIGETLVLPKSAFTVGLTVLSKFPSSDMPIKFDKILYNEFNHYDTAAGKFTCHIAGVYYFTYHITVFSRNVQVSLVKNGVKILHTKDAYMSSEDQASGGIVLQLKLGDEVWLQVTGGERFNGLFADEDGDTTFTGFLLFSSP

SEQ ID NO: 267 - DNA, 818 bp, Artificial Sequence
  Description of Artifical Sequence:  Primer/Probe
tccctctttcagttcagagtctgtcatctgaaccatgaggatctggtggcttctgcttgccattgaaatctgcacagggaacataaactcacaggacacctgcaggcaagggcaccctggaatccctgggaaccccggtcacaatggtctgcctggaagagatggacgagacggagcgaagggtgacaaaggcgatgcaggtaagcctggtcccaaaggagaagctggacccacggggccccagggtgagccaggagtccggggaataagaggctggaaaggagatcgaggagagaaagggaaaatcggtgagactctagtcttgccaaaaagtgctttcactgtggggctcacggtgctgagcaagtttccttcttcagatatgcccattaaatttgataagatcctgtataacgaattcaaccattatgatacagcagcggggaaattcacgtgccacattgctggggtctattacttcacctaccacatcactgttttctccagaaatgttcaggtgtctttggtcaaaaatggagtaaaaatactgcacaccaaagatgcttacatgagctctgaggaccaggcctctggcggcattgtcctgcagctgaagctcggggatgaggtgtggctgcaggtgacaggaggagagaggttcaatggcttgtttgctgatgaggacgatgacacaactttcacagggttccttctgtccagcagcccgtgacagaggagagtttaaaaatccgccacaccatccatcagaatcagcttgggatgaacttattcagatggttttactttattaattcctc

SEQ ID NO: 268 - protein, 231 aa, Artificial Sequence
  Description of Artifical Sequence:  Domain
MRIWWLLLAIEICTGNINSQDTCRQGHPGIPGNPGHNGLPGRDGRDGAKGDKGDAGKPGPKGEAGPTGPQGEPGVRGIRGWKGDRGEKGKIGETLVLPKSAFTVGLTVLSKFPSSDMPIKFDKILYNEFNHYDTAAGKFTCHIAGVYYFTYHITVFSRNVQVSLVKNGVKILHTKDAYMSSEDQASGGIVLQLKLGDEVWLQVTGGERFNGLFADEDDDTTFTGFLLSSSP

SEQ ID NO: 269 - DNA, 1019 bp, Artificial Sequence
  Description of Artifical Sequence:  Primer/Probe
ggttccaggaactcaggatctgcagtgaggaccagacaccactgattgcaggaatgtgttccctccccatggcaagatactacagaattaaatatgcagaccagaaggctctatacacaagagatggccagctgctggtgggagatcctgttgcagacaactgctgtgcagagaagatctgcatacttcctaacagaggcttggcccgcaccaaggtccccattttcctggggatccagggagggagccgctgcctggcatgtgtggagacagaagaggggccttccctacagctggagccatccaccttgcccccacaggatgtgaacattgaggaactgtacaaaggtggtgaagaggccacacgcttcaccttcttccagagcagctcaggctccgccttcaggcttgaggctgctgcctggcctggctggttcctgtgtggcccggcagagccccagcagccagtacagctcaccaaggagagtgagccctcagcccgtaccaagttttactttgaacagagctggtagggagacaggaaactgcgttttagccttgtgcccccaaaccaagctcatcctgctcagggtctatggtaggcagaataatgtcccccgaaatatgtccacatcctaatcccaagatctgtgcatatgttaccatacatgtccaaagaggttttgcaaatgtgattatgttaaggatcttgaaatgaggagacaatcctgggttatccttgtgggctcagtttaatcacaagaaggaggcaggaagggagagtcagagagagaatggaagataccatgcttctaattttgaagatggagtgaggggccttgagccaacatatgcaggtgtttttagaaggaggaaaagccaagggaacggattctcctctatagtctccggaaggaacacagctcttgacacatggatttcagctcagtgacacccatttcagacttctgacctccacaactataaaataataaacttgtgttattgtaaacctctgg

SEQ ID NO: 270 - protein, 159 aa, Artificial Sequence
  Description of Artifical Sequence:  Domain
MCSLPMARYYRIKYADQKALYTRDGQLLVGDPVADNCCAEKICILPNRGLARTKVPIFLGIQGGSRCLACVETEEGPSLQLEPSTLPPQDVNIEELYKGGEEATRFTFFQSSSGSAFRLEAAAWPGWFLCGPAEPQQPVQLTKESEPSARTKFYFEQSW

SEQ ID NO: 271 - DNA, 499 bp, Artificial Sequence
  Description of Artifical Sequence:  Primer/Probe
ccactgattgcaggaatgtgttccctccccatggcaagatactacataattaaatatgcagaccagaaggctctatacacaagagatggccagctgctggtgggagatcctgttgcagacaactgctgtgcagagaagatctgcatacttcctaacagaggcttggcccgcaccaaggtccccattttcctggggatccagggagggagccgctgcctggcatgtgtggagacagaagaggggccttccctacagctggaggatgtgaacattgaggaactgtacaaaggtggtgaagaggccacacgcttcaccttcttccagagcagctcaggctccgccttcaggcttgaggctgctgcctggcctggctggttcctgtgtggcccggcagagccccagcagccagtacagctcaccaaggagagtgagccctcagcccgtaccaagttttactttgaacagagctggtagggagacaggaaactgcgttttagcc

SEQ ID NO: 272 - protein, 152 aa, Artificial Sequence
  Description of Artifical Sequence:  Domain
MCSLPMARYYIIKYADQKALYTRDGQLLVGDPVADNCCAEKICILPNRGLARTKVPIFLGIQGGSRCLACVETEEGPSLQLEDVNIEELYKGGEEATRFTFFQSSSGSAFRLEAAAWPGWFLCGPAEPQQPVQLTKESEPSARTKFYFEQSW

SEQ ID NO: 273 - DNA, 483 bp, Artificial Sequence
  Description of Artifical Sequence:  Primer/Probe
cactgtcatactgtttcagaattaaatatgcagaccagaaggctctatacacaagagatggccagctgctggtgggagatcctgttgcagacaactgctgtgcagagaagatctgcatacttcctaacagaggcttggcccgcaccaaggtccccattttcctggggatccagggagggagccgctgcctggcatgtgtggagacagaagaggggccttccctacagctggagccatccaccttgcccccacaggatgtgaacattgaggaactgtacaaaggtggtgaagaggccacacgcttcaccttcttccagagcagctcaggctccgccttcaggcttgaggctgctgcctggcctggctggttcctgtgtggcccggcagagccccagcagccagtacagctcaccaaggagagtgagccctcagcccgtaccaagttttactttgaacagagctggtagggagacaggaaactgc

SEQ ID NO: 274 - protein, 154 aa, Artificial Sequence
  Description of Artifical Sequence:  Domain
LSYCFRIKYADQKALYTRDGQLLVGDPVADNCCAEKICILPNRGLARTKVPIFLGIQGGSRCLACVETEEGPSLQLEPSTLPPQDVNIEELYKGGEEATRFTFFQSSSGSAFRLEAAAWPGWFLCGPAEPQQPVQLTKESEPSARTKFYFEQSW

SEQ ID NO: 275 - DNA, 1019 bp, Artificial Sequence
  Description of Artifical Sequence:  Primer/Probe
ggttccaggaactcaggatctgcagtgaggaccagacaccactgattgcaggaatgtgttccctccccatggcaagatactacagaattaaatatgcagaccagaaggctctatacacaagagacggccagctgctggtgggagatcctgttgcagacaactgctgtgcagagaagatctgcatacttcctaacagaggcttggcccgcaccaaggtccccattttcctggggatccagggagggagccgctgcctggcatgtgtggagacagaagaggggccttccctacagctggagccatccaccttgcccccacaggatgtgaacattgaggaactgtacaaaggtggtgaagaggccacacgcttcaccttcttccagagcagctcaggctccgccttcaggcttgaggctgctgcctggcctggctggttcctgtgtggcccggcagagccccagcagccagtacagctcaccaaggagagtgagccctcagcccgtaccaagttttactttgaacagagctggtagggagacaggaaactgcgttttagccttgtgcccccaaaccaagctcatcctgctcagggtctatggtaggcagaataatgtcccccgaaatatgtccacatcctaatcccaagatctgtgcatatgttaccatacatgtccaaagaggttttgcaaatgtgattatgttaaggatcttgaaatgaggagacaatcctgggttatccttgtgggctcagtttaatcacaagaaggaggcaggaagggagagtcagagagagaatggaagataccatgcttctaattttgaagatggagtgaggggccttgagccaacatatgcaggtgtttttagaaggaggaaaagccaagggaacggattctcctctatagtctccggaaggaacacagctcttgacacatggatttcagctcagtgacacccatttcagacttctgacctccacaactataaaataataaacttgtgttattgtaaacctctgg

SEQ ID NO: 276 - protein, 159 aa, Artificial Sequence; identical to SEQ ID NO: 270
  Description of Artifical Sequence:  Domain

SEQ ID NO: 277 - DNA, 1019 bp, Artificial Sequence
  Description of Artifical Sequence:  Primer/Probe
ggttccaggaactcaggatctgcagtgaggaccagacaccactgattgcaggaatgtgttccctccccatggcaagatactacagaattaaatatgcagaccagaaggctctatacacaagagatggccagctgctggtgggagatcctgttgcagacaactgctgtgcagagaagatctgcacacttcctaacagaggcttggcccgcaccaaggtccccattttcctggggatccagggagggagccgctgcctggcatgtgtggagacagaagaggggccttccctacagctggagccatccaccttgcccccacaggatgtgaacattgaggaactgtacaaaggtggtgaagaggccacacgcttcaccttcttccagagcagctcaggctccgccttcaggcttgaggctgctgcctggcctggctggttcctgtgtggcccggcagagccccagcagccagtacagctcaccaaggagagtgagccctcagcccgtaccaagttttactttgaacagagctggtagggagacaggaaactgcgttttagccttgtgcccccaaaccaagctcatcctgctcagggtctatggtaggcagaataatgtcccccgaaatatgtccacatcctaatcccaagatctgtgcatatgttaccatacatgtccaaagaggttttgcaaatgtgattatgttaaggatcttgaaatgaggagacaatcctgggttatccttgtgggctcagtttaatcacaagaaggaggcaggaagggagagtcagagagagaatggaagataccatgcttctaattttgaagatggagtgaggggccttgagccaacatatgcaggtgtttttagaaggaggaaaagccaagggaacggattctcctctatagtctccggaaggaacacagctcttgacacatggatttcagctcagtgacacccatttcagacttctgacctccacaactataaaataataaacttgtgttattgtaaacctctgg

SEQ ID NO: 278 - protein, 159 aa, Artificial Sequence
  Description of Artifical Sequence:  Domain
MCSLPMARYYRIKYADQKALYTRDGQLLVGDPVADNCCAEKICTLPNRGLARTKVPIFLGIQGGSRCLACVETEEGPSLQLEPSTLPPQDVNIEELYKGGEEATRFTFFQSSSGSAFRLEAAAWPGWFLCGPAEPQQPVQLTKESEPSARTKFYFEQSW

SEQ ID NO: 279 - DNA, 1019 bp, Artificial Sequence
  Description of Artifical Sequence:  Primer/Probe
ggttccaggaactcaggatctgcagtgaggaccagacaccactgattgcaggaatgtgttccctccccatggcaagatactacagaattaaatatgcagaccagaaggctctatacacaagagatggccagctgctggtgggagatcctgttgcagacaactgctgtgcagagaagatctgcatacttcctaacagaggcttggaccgcaccaaggtccccattttcctggggatccagggagggagccgctgcctggcatgtgtggagacagaagaggggccttccctacagctggagccatccaccttgcccccacaggatgtgaacattgaggaactgtacaaaggtggtgaagaggccacacgcttcaccttcttccagagcagctcaggctccgccttcaggcttgaggctgctgcctggcctggctggttcctgtgtggcccggcagagccccagcagccagtacagctcaccaaggagagtgagccctcagcccgtaccaagttttactttgaacagagctggtagggagacaggaaactgcgttttagccttgtgcccccaaaccaagctcatcctgctcagggtctatggtaggcagaataatgtcccccgaaatatgtccacatcctaatcccaagatctgtgcatatgttaccatacatgtccaaagaggttttgcaaatgtgattatgttaaggatcttgaaatgaggagacaatcctgggttatccttgtgggctcagtttaatcacaagaaggaggcaggaagggagagtcagagagagaatggaagataccatgcttctaattttgaagatggagtgaggggccttgagccaacatatgcaggtgtttttagaaggaggaaaagccaagggaacggattctcctctatagtctccggaaggaacacagctcttgacacatggatttcagctcagtgacacccatttcagacttctgacctccacaactataaaataataaacttgtgttattgtaaacctctgg

SEQ ID NO: 280 - protein, 159 aa, Artificial Sequence
  Description of Artifical Sequence:  Domain
MCSLPMARYYRIKYADQKALYTRDGQLLVGDPVADNCCAEKICILPNRGLDRTKVPIFLGIQGGSRCLACVETEEGPSLQLEPSTLPPQDVNIEELYKGGEEATRFTFFQSSSGSAFRLEAAAWPGWFLCGPAEPQQPVQLTKESEPSARTKFYFEQSW

SEQ ID NO: 281 - DNA, 1377 bp, Artificial Sequence
  Description of Artifical Sequence:  Primer/Probe
tgggaacataatccttggactgcatgttccgtgtcctgtggaggagggattcagagacggagctttgtgtgtgtagaggaatccatgcatggagagatattgcaggtggaagaatggaagtgcatgtacgcacccaaacccaaggttatgcaaacttgtaatctgtttgattgccccaagtggattgccatggagtggtctcagtgcacagtgacttgtggccgagggttacggtaccgggttgttctgtgtattaaccaccgcggagagcatgttgggggctgcaatccacaactgaagttacacatcaaagaagaatgtgtcattcccatcccgtgttataaaccaaaagaaaaaagtccagtggaagcaaaattgccttggctgaaacaagcacaagaactagaagagaccagaatagcaacagaagaaccaacgttcattccagaaccctggtcagcctgcagtaccacgtgtgggccgggtgtgcaggtccgtgaggtgaagtgccgtgtgctcctcacattcacgcagactgagactgagctgcccgaggaagagtgtgaaggccccaagctgcccaccgaacggccctgcctcctggaagcatgtgatgagagcccggcctcccgagagctagacatccctctccctgaggacagtgagacgacttacgactgggagtacgctgggttcaccccttgcacagcaacatgcgtgggaggccatcaagaagccatagcagtgtgcttacatatccagacccagcagacagtcaatgacagcttgtgtgatatggtccaccgtcctccagccatgagccaggcctgtaacacagagccctgtccccccaggtggcatgtgggctcttgggggccctgctcagctacctgtggagttggaattcagacccgagatgtgtactgcctgcacccaggggagacccctgcccctcctgaggagtgccgagatgaaaagccccatgctttacaagcatgcaatcagtttgactgccctcctggctggcacattgaagaatggcagcagtgttccaggacttgtggcgggggaactcagaacagaagagtcacctgtcggcagctgctaacggatggcagctttttgaatctctcagatgaattgtgccaaggacccaaggcatcgtctcacaagtcctgtgccaggacagactgtcctccacatttagctgtgggagactggtcgaagtgttctgtcagttgtggtgttggaatccagagaagaaagcaggtgtgtcaaaggctggcagccaaaggtcggcgcatccccctcagtgagatgatgtgcagggatctaccagggctccctcttgtaagatcttgccagatgcctgagtgc

SEQ ID NO: 282 - protein, 458 aa, Artificial Sequence
  Description of Artifical Sequence:  Domain
EHNPWTACSVSCGGGIQRRSFVCVEESMHGEILQVEEWKCMYAPKPKVMQTCNLFDCPKWIAMEWSQCTVTCGRGLRYRVVLCINHRGEHVGGCNPQLKLHIKEECVIPIPCYKPKEKSPVEAKLPWLKQAQELEETRIATEEPTFIPEPWSACSTTCGPGVQVREVKCRVLLTFTQTETELPEEECEGPKLPTERPCLLEACDESPASRELDIPLPEDSETTYDWEYAGFTPCTATCVGGHQEAIAVCLHIQTQQTVNDSLCDMVHRPPAMSQACNTEPCPPRWHVGSWGPCSATCGVGIQTRDVYCLHPGETPAPPEECRDEKPHALQACNQFDCPPGWHIEEWQQCSRTCGGGTQNRRVTCRQLLTDGSFLNLSDELCQGPKASSHKSCARTDCPPHLAVGDWSKCSVSCGVGIQRRKQVCQRLAAKGRRIPLSEMMCRDLPGLPLVRSCQMPEC

SEQ ID NO: 283 - DNA, 19 bp, Artificial Sequence
  Description of Artifical Sequence:  Primer/Probe
gaaagccttccagcaccat

SEQ ID NO: 284 - DNA, 28 bp, Artificial Sequence
  Description of Artifical Sequence:  Primer/Probe
ttggatggaaacattttccagatacctc

SEQ ID NO: 285 - DNA, 19 bp, Artificial Sequence
  Description of Artifical Sequence:  Primer/Probe
gcccagaaagatggcagag

SEQ ID NO: 286 - DNA, 22 bp, Artificial Sequence
  Description of Artifical Sequence:  Primer/Probe
cccgaagaatgaaaagtacaca

SEQ ID NO: 287 - DNA, 26 bp, Artificial Sequence
  Description of Artifical Sequence:  Primer/Probe
tcccatggaattcaagaccctgaaca

SEQ ID NO: 288 - DNA, 22 bp, Artificial Sequence
  Description of Artifical Sequence:  Primer/Probe
aatgggtagaagttggctctgt

SEQ ID NO: 289 - DNA, 19 bp, Artificial Sequence
  Description of Artifical Sequence:  Primer/Probe
ccacgtgatcaccaacatg

SEQ ID NO: 290 - DNA, 25 bp, Artificial Sequence
  Description of Artifical Sequence:  Primer/Probe
taacaacaattatgagccccgcagt

SEQ ID NO: 291 - DNA, 22 bp, Artificial Sequence
  Description of Artifical Sequence:  Primer/Probe
tggcgtggtaggtgaagtagta

SEQ ID NO: 292 - DNA, 20 bp, Artificial Sequence
  Description of Artifical Sequence:  Primer/Probe
ctgtgacctcatgtgctgtg

SEQ ID NO: 293 - DNA, 25 bp, Artificial Sequence
  Description of Artifical Sequence:  Primer/Probe
tgtggctacaacacccaccagtacg

SEQ ID NO: 294 - DNA, 20 bp, Artificial Sequence
  Description of Artifical Sequence:  Primer/Probe
acatagcagcaccagtggaa

SEQ ID NO: 295 - DNA, 20 bp, Artificial Sequence
  Description of Artifical Sequence:  Primer/Probe
gacctggtgtacatggagga

SEQ ID NO: 296 - DNA, 23 bp, Artificial Sequence
  Description of Artifical Sequence:  Primer/Probe
tcttctgccggcccagcaagtac

SEQ ID NO: 297 - DNA, 19 bp, Artificial Sequence
  Description of Artifical Sequence:  Primer/Probe
gagcacaccctacctgctg

SEQ ID NO: 298 - DNA, 21 bp, Artificial Sequence
  Description of Artifical Sequence:  Primer/Probe
gtccaagagaggaaacaagga

SEQ ID NO: 299 - DNA, 24 bp, Artificial Sequence
  Description of Artifical Sequence:  Primer/Probe
tcacaatacccacgtgggcatcaa

SEQ ID NO: 300 - DNA, 20 bp, Artificial Sequence
  Description of Artifical Sequence:  Primer/Probe
gtcctgaggccactcttcac

SEQ ID NO: 301 - DNA, 20 bp, Artificial Sequence
  Description of Artifical Sequence:  Primer/Probe
ggatgactcgcctagcttct

SEQ ID NO: 302 - DNA, 23 bp, Artificial Sequence
  Description of Artifical Sequence:  Primer/Probe
tgccgtaggtgccaccgtgagaa

SEQ ID NO: 303 - DNA, 19 bp, Artificial Sequence
  Description of Artifical Sequence:  Primer/Probe
agcagatgctctcgcagtt

SEQ ID NO: 304 - DNA, 20 bp, Artificial Sequence
  Description of Artifical Sequence:  Primer/Probe
acagcagcaagttcgtcaag

SEQ ID NO: 305 - DNA, 25 bp, Artificial Sequence
  Description of Artifical Sequence:  Primer/Probe
tagacggtcaagcaaggatctgcga

SEQ ID NO: 306 - DNA, 20 bp, Artificial Sequence
  Description of Artifical Sequence:  Primer/Probe
cacgaggttgttgtggaagt

SEQ ID NO: 307 - DNA, 18 bp, Artificial Sequence
  Description of Artifical Sequence:  Primer/Probe
ttccagcccatccccatt

SEQ ID NO: 308 - DNA, 22 bp, Artificial Sequence
  Description of Artifical Sequence:  Primer/Probe
tccccacacctccctgagggac

SEQ ID NO: 309 - DNA, 23 bp, Artificial Sequence
  Description of Artifical Sequence:  Primer/Probe
cagatcatgactcagctgcagtc

SEQ ID NO: 310 - DNA, 19 bp, Artificial Sequence
  Description of Artifical Sequence:  Primer/Probe
aactccaaggtcgccttct

SEQ ID NO: 311 - DNA, 23 bp, Artificial Sequence
  Description of Artifical Sequence:  Primer/Probe
taaccacgagccatccgagatga

SEQ ID NO: 312 - DNA, 21 bp, Artificial Sequence
  Description of Artifical Sequence:  Primer/Probe
agtaaatgatgcgcgtcttgt

SEQ ID NO: 313 - DNA, 18 bp, Artificial Sequence
  Description of Artifical Sequence:  Primer/Probe
gcagcatggaccctccaa

SEQ ID NO: 314 - DNA, 30 bp, Artificial Sequence
  Description of Artifical Sequence:  Primer/Probe
tacactcgttgcatcttcctttgacaacct

SEQ ID NO: 315 - DNA, 23 bp, Artificial Sequence
  Description of Artifical Sequence:  Primer/Probe
tcggctcttttgccttagaaata

SEQ ID NO: 316 - DNA, 21 bp, Artificial Sequence
  Description of Artifical Sequence:  Primer/Probe
atcaaacagctccacatccat

SEQ ID NO: 317 - DNA, 26 bp, Artificial Sequence
  Description of Artifical Sequence:  Primer/Probe
taaaagccagatttcaccacagtcaa

SEQ ID NO: 318 - DNA, 22 bp, Artificial Sequence
  Description of Artifical Sequence:  Primer/Probe
agcgcacagtgtagttgacaat

SEQ ID NO: 319 - DNA, 22 bp, Artificial Sequence
  Description of Artifical Sequence:  Primer/Probe
gtgtctgtgagaggcagctatc

SEQ ID NO: 320 - DNA, 29 bp, Artificial Sequence
  Description of Artifical Sequence:  Primer/Probe
ttgcactctaaactgcaaacagaaatcag

SEQ ID NO: 321 - DNA, 22 bp, Artificial Sequence
  Description of Artifical Sequence:  Primer/Probe
ccccaaaagctacattttgata

SEQ ID NO: 322 - DNA, 22 bp, Artificial Sequence
  Description of Artifical Sequence:  Primer/Probe
ccaagttcttcctagtggcttt

SEQ ID NO: 323 - DNA, 26 bp, Artificial Sequence
  Description of Artifical Sequence:  Primer/Probe
ttttctccttcgcccaggttgtaatt

SEQ ID NO: 324 - DNA, 22 bp, Artificial Sequence
  Description of Artifical Sequence:  Primer/Probe
atacctagcgaccaccaagaat

SEQ ID NO: 325 - DNA, 22 bp, Artificial Sequence
  Description of Artifical Sequence:  Primer/Probe
ctgaagctggcatggtacttaa

SEQ ID NO: 326 - DNA, 26 bp, Artificial Sequence
  Description of Artifical Sequence:  Primer/Probe
tcagtcctttctctttgaacgacagc

SEQ ID NO: 327 - DNA, 22 bp, Artificial Sequence
  Description of Artifical Sequence:  Primer/Probe
ttgtaggcttcaatctcttcca

SEQ ID NO: 328 - DNA, 21 bp, Artificial Sequence
  Description of Artifical Sequence:  Primer/Probe
tgctatgaaaggcaagcataa

SEQ ID NO: 329 - DNA, 29 bp, Artificial Sequence
  Description of Artifical Sequence:  Primer/Probe
ttgaatgccacaactttatcaaagtattt

SEQ ID NO: 330 - DNA, 22 bp, Artificial Sequence
  Description of Artifical Sequence:  Primer/Probe
aaaaccatctcatcgtttcttg

SEQ ID NO: 331 - DNA, 22 bp, Artificial Sequence
  Description of Artifical Sequence:  Primer/Probe
cacattgctggggtctattact

SEQ ID NO: 332 - DNA, 27 bp, Artificial Sequence
  Description of Artifical Sequence:  Primer/Probe
ttcacctaccacatcactgttttctcc

SEQ ID NO: 333 - DNA, 22 bp, Artificial Sequence
  Description of Artifical Sequence:  Primer/Probe
ttttgaccaaagacacctgaac

SEQ ID NO: 334 - DNA, 21 bp, Artificial Sequence
  Description of Artifical Sequence:  Primer/Probe
tttctccaggaatgttcaggt

SEQ ID NO: 335 - DNA, 26 bp, Artificial Sequence
  Description of Artifical Sequence:  Primer/Probe
tactgcacaccaaagatgcttacatg

SEQ ID NO: 336 - DNA, 17 bp, Artificial Sequence
  Description of Artifical Sequence:  Primer/Probe
cagaggcctggtcctca

SEQ ID NO: 337 - DNA, 22 bp, Artificial Sequence
  Description of Artifical Sequence:  Primer/Probe
cctctatagtctccggaaggaa

SEQ ID NO: 338 - DNA, 26 bp, Artificial Sequence
  Description of Artifical Sequence:  Primer/Probe
ttggatttcagctcagtgacacccat

SEQ ID NO: 339 - DNA, 22 bp, Artificial Sequence
  Description of Artifical Sequence:  Primer/Probe
gttgtggaggtcagaagtctga
